United States Patent Application Publication US 2021/0254182 A1 - sequence listing, part 15

SEQ ID NO: 95 - DNA, 3285870 bp, Phytopthora sojae (residues 1,642,936-3,285,870 of 3,285,870)
  misc_feature (263648)..(263747): n is a, c, g, or t
  misc_feature (557455)..(557554): n is a, c, g, or t
  misc_feature (574954)..(575053): n is a, c, g, or t
  misc_feature (608463)..(608904): n is a, c, g, or t
  misc_feature (891296)..(891395): n is a, c, g, or t
  misc_feature (1473100)..(1473199): n is a, c, g, or t
  misc_feature (1644637)..(1644736): n is a, c, g, or t
  misc_feature (1963014)..(1963113): n is a, c, g, or t
  misc_feature (1971813)..(1971912): n is a, c, g, or t
  misc_feature (1986489)..(1996354): n is a, c, g, or t
  misc_feature (1997814)..(2000634): n is a, c, g, or t
  misc_feature (2003454)..(2003583): n is a, c, g, or t
  misc_feature (2004939)..(2006871): n is a, c, g, or t
  misc_feature (2009031)..(2009454): n is a, c, g, or t
  misc_feature (2012268)..(2012844): n is a, c, g, or t
  misc_feature (2014433)..(2019979): n is a, c, g, or t
  misc_feature (2021786)..(2026103): n is a, c, g, or t
  misc_feature (2027741)..(2028336): n is a, c, g, or t
  misc_feature (2037277)..(2037430): n is a, c, g, or t
  misc_feature (2041554)..(2041799): n is a, c, g, or t
  misc_feature (2043760)..(2044451): n is a, c, g, or t
  misc_feature (2054153)..(2054252): n is a, c, g, or t
  misc_feature (2637149)..(2637248): n is a, c, g, or t
  misc_feature (2647589)..(2647695): n is a, c, g, or t
  misc_feature (2648947)..(2654178): n is a, c, g, or t
  misc_feature (2658887)..(2659925): n is a, c, g, or t
  misc_feature (2697604)..(2697703): n is a, c, g, or t
  misc_feature (2705828)..(2706718): n is a, c, g, or t
  misc_feature (2708369)..(2710022): n is a, c, g, or t
  misc_feature (2715780)..(2715879): n is a, c, g, or t
  misc_feature (2718593)..(2725319): n is a, c, g, or t
  misc_feature (2742971)..(2745532): n is a, c, g, or t
  misc_feature (2746812)..(2750862): n is a, c, g, or t
  misc_feature (2868256)..(2868355): n is a, c, g, or t
  misc_feature (3079580)..(3079679): n is a, c, g, or t
  misc_feature (3096167)..(3100856): n is a, c, g, or t
  misc_feature (3102732)..(3107068): n is a, c, g, or t
  misc_feature (3148356)..(3148455): n is a, c, g, or t
  misc_feature (3167670)..(3178447): n is a, c, g, or t
  misc_feature (3180006)..(3180268): n is a, c, g, or t
  misc_feature (3183977)..(3187070): n is a, c, g, or t
  misc_feature (3190222)..(3193398): n is a, c, g, or t
  misc_feature (3214568)..(3231537): n is a, c, g, or t
  misc_feature (3237094)..(3237376): n is a, c, g, or t
  misc_feature (3254227)..(3267931): n is a, c, g, or t
  misc_feature (3275636)..(3276075): n is a, c, g, or t
  misc_feature (3281646)..(3284794): n is a, c, g, or t
ccatttccagtaaatcgttcacggaaggtatagccgtagacatgcagagtttgttgtggcccaaacaaacacgagagatacaccactgacccaccggaatgtgactatacttggattttcgtgtcttttttttttaagtaggcttacgtttcttggtcatccagacgtaccacgaataatacacttgccacggtttacagacccacttcaccatagtatccccagagtagtctgccccacatacttgctgttggaaagggcgagctttcgcaggagtagcgtcagctcctccgttccagaaaacgcggcacctcgtgatagtctggtagatatttcatgagagatagacaggcctccggcattattgctttcatcttcgctttcctccatactgcttgttctcaaccacctcaagatgaagtgggagcaacagacgagactctcgaaaactgttaatacaacccttgacaattaaaaaagcttttacaggcctcgtcaccttcactgtcgtcaggactgggcgtcgtcttgggcctcggcgtcattttcagcatgagtgagagcttgagcacctagctaccgttccagactgttatgtgcacgaccagcatggtcaacaccacgccgtccctgtacgtgcgtcccagtgaacgggggtgggcggcagatgtctggccggtggcagcgccacgactaacacgaccccttcaccgctgtcttctcttgcttcatggatgtgggcgactggttggcagcagcagcgtaacggcacgcgcagccggcgcgatcacggccgccgtctcctccttcgtgtccgtcttcttggtggcggggtctccttcgtcgtgtcaagattcttgggggtgggcagcgggggacggactggtagcagcagcgccagggccagcccggccggcgccatctcgtcttgtgcttctcggacggcgccacctccttcgtgtcaagcttaatgggggcggtcgtctcctacgccgtctacttctgcacaccgtggctgcgggggggggggggggctggctagctggcagtagcagcagcagcgtcacggacagcatggccggcaccatcatggccatctcttccttcttcatgtcttgcttctcgggggcgggcggcggatgggtgggtggcagaagcgcctcgacgagcatggtaccatcacggtcgtcgtctcctcctgcttcgtggcggcggcgactgcgggcgactcttgagcttgaccaacatgacctccgctcctgcactgagtgggcgcgtgccggcttgctcttcggctcgtcgggttctggcttgtgggcacctgctcgagctgcggctcggcttggccacttttcagccaattaaactatttgtaacgggagacaataaaagctgacgctattgtaacggtccagatattcggatgacacatatgatgctggtggcggagacaatactgttgaagaagatgaggaagaacaaggacgtggagcctgcttatacgggctgctcggcacgccgttacatggatctggcaacaaggaatgctagttccactaattaatcatcgctcgtgtgtccgacgaaacaaggagctgcatggacggcatgagatgcatcacgtacgggattgttcgcggtgagaccaccgccaagagttcgaaagcggtggtgaaccacgatatgcgcgcttgccactgtnnnnnnnnnnnnnnnnnnnnnnnnnnnnnnnnnnnnnnnnnnnnnnnnnnnnnnnnnnnnnnnnnnnnnnnnnnnnnnnnnnnnnnnnnnnnnnnnnnnnaaagcgatcttcgagcagtttttacaaatgtttttttagtgaaaacaagatgggcggggacatcatcttgcttgctcttacaacattaagcgaaagaacaggcgttgatgacgctcatgtgtgtctattaaggtacaaataactactctagccttctaccgccgtctactttgtgcgaggatcacgacgcctatgatatcgattagcctcccctaagatcgattttagacttgacttgagaattagtgttgccaaagtatgcgtggacttccgactgcagtgtataaactactaactgtacgattcgctgtaccgctcggtgaccttcaacttactacgcctagccaggggctggtatatgctcttttttgagaaggtgcggagtgagaacccacctggcttgggtaactgtttcaatgtatcactgatggtactctccagtttgggcagagactggtacgggcctgcttatctgtgagagtgttgtcactaggactgcgcattcaccttgtcgaaccgcttacgatatgtccgcaatgtggccggtcttaccttatcgccagctgattttgtaacagggttacacgagagttacccgaagggttactgagtgtgggacgcacaggcttgtgggatacgcctgcttcgtagccacaacatgtgctcgtttggcttggagcttgacacaaagaatttttatttgttattttcatagattcacactggggtgacgctcatcagctccatctcgctgtatgcatcggacaacacggttcgtagcacgaacagcgtgttatggccctaagccctttttaacggagacaactcaacctgctaacgctttggcgttgatgggtctgtaagttgaaccgaaaatggttgccaataggagcgcactacaaagcagggttggtagaaatagccccatcagcgcattgttgtcttgctggaggtgatgctaggcgctggctgactgatgacacctcgcgcgccttactgcgacgacgatcggctcctggtggacagcaagttgaccgagctttgaacataaacatgtcatcaacttaaggcatttccgtcctttgaagcgaaattaatatcggacataagcggaggggccgaagacacaggtggaatcaataaaaatcgtgaattttccggggtattaatttttatgcgtggtactgtacgctatcagcacaataattactcttcaagtattactaaatccccccctccatgcttcttattttgtgactgcgccttttccagaccaagttcatcaggaacaagaccaaattcataatgaacaaaagcaaatgcactaaaacccaaagcaaaaaatattgtgcaaactcaaatgcattcaagcaagtatcgttgacgttccaaatttcataccccgacaaatacgcaattgtcgtacttgcttctcgttaccgcttagcagccctcgagagcggccaccttgacgaggaatctgagtgtgtggtagtagcacgatgcacacagctgcgctgtcgtaacacgggggaagagcgtctcagcagcctcgatggggaagtgttggagatgcgctttcatcgtcgtaccaggcggaacagcgatgatctcagctcggcgctcggtcatgaagtcctttacagccgacttgaaagctgagaacacattctcaatagggttgagcaaatatgagtagggtccaagcgtaggagtgttgctgccgcgaattctggcccttggaagaccagctcaccacgcgcgttgcacggtgtattgtacaggaccaccactaccttgctcacgtccgcgaacttccgcagtgtgttgcgaacgaactcgttggagtgctggtacttgttgctacccagcttcatctcgtagtggatgacccctaccttaccgatgtaggcaaccatctgcaagttttggccgccacctgccagcatcttcttgacagcgtgcctgcctctgatgcactgcgaccacgcgtgcgagatgaccagagattaaaattggtctcgtccatgtagccaatggactttccaacagcctgcagctgctgcaatctgacgaggaagtccctgcgctttatcttgttctgctcggtgttcatgtgctgcggtgcggctctttgtgaaacttcttcatcatgaccagacttgcatcgagatggtttttgttttcacggtttgtgggcacaccaagattgagcaggatcgctcgagctcgtccagcgagcaggcgaagcgtgagatcggggtcgacagagagcttggacatgaaaaaggcaaggccatcagctgcgcccgttctccgccatccaacggagcgtgcaaagcagcagatctggtagggtagcgacgtagccagaaacgagcagtgttgatgttgacgccattggactcagccactgcttcccagtccgctccagtacgagcagcatcaaggatgcgaagcttggtagcgaacgtgtagcggttgtagcgaaacggcatggcgagcacagaggatgttgtaaaagtgagaaaaggccagcgtgcgagcccaccgcggtcgcacgagccgagcgaacccaacaagaaaggaggcggcgcagctattggcggaatcgaggagggattggcgagcgccgccgagctgaacgtagttgctttggtacgcaatagagggaatggattgcctgttaattagaataagagttaataaaagctttattgtaggattgttcacttgacatgtactttatgcagttgaattggtttctagtgtattggcctttgttcgttgtgaaattggtcttgttcctgctggacttggcctaagaaagacattcatcgcaattgcacgcttggcccgaagctcgttcattatgagcgaggcatcattgtagactggtgcatggttcgacacttggcgatgcagtcattcgtataattcgagacagacttagaatggcaatgataactagacaagccaaatcagtgcgttaatataacccggggaagttagtctacaccgaaaacaaacggcaactatccataaaataccgtttagctgtactgcgtcggagtttaaatttgcaaaccggtataaatcataggtatagcttttgaacattgtacttaaaaataagaaactatgagtactgcggccactcgcacacactcccacacactcccacttagcggtacttccccgactactcagcttgcatttctggaattcttcaaccttgggtgatatgattcccttggccagaatgtcactgcaatatcctgatgaagtagaaatccaaagcgaactatagcttgcgtattctgcactcgctagtcataggaagtacaagggtcgtcagacggttggtacacatctgctgtaggttctcacgaacacactcgaatgacgatcattaggcggaagcaggggttatgcagactggaatcggcaaattatttgttccagagagacgggtagtgttgtatcagactcgcttatgatatgggttatgcgttgcattgaacaataatttatgtgctcaccaagcgttttgtccgctcggatctccgcgctctcaagggactaagcgtcaccaaatcctggccaatatactccagaatgcctatggaaaactgggaattctggtcgattcacatctatatcgaccagggctaagctaaacggccaatcagcgcctttaacaaggttttcacatgtacgagggcagctgaatcccccatctggaaaatataagagcgatagtgtcgtctccatgcttagtataataaggagtaaccggaggtatacatatcgtaacttgaggtaaatggagcgctaatttcttcataccggtcgatttagagctgatgtaggcaaaatgtgtggtgagcacaatacatatcctcttataaatatacgtccgacctctttcaaattcatgttttgtaaaaccctgagcgtgtctatctcagctcacagtaagcccacgctccttcctccatcttcacctccatatccagcgccgtcaccgacccaaaaatacatttggcagtccaaaaaatatttttggtaaacaaaacgggaaaaatatacttacttcttcccttgaaataacgccaaatagcattttatttcagccaatcataggagagatcaaggtaatgctaaactcgcctgcgatatttagcccattatcattttttaaggagatagcatggctgcaatttacttataccgctctttggttcgccggttgtacagctatcggctgcacaggtagcatagatattgaatggaagaatatccatcgtctccagggttgttttcatttcacttgttcggccttggtaaatttaactatatgtatagagtgtggctgtattgtggtcgttatagctttggcaataggccaaagaagagtggctagatgtaggtttataccaaaaccaactaacttcactgtaaactgcgaattcatacctgtaagcacaaggaagtcataccaaaaagtatgcgttcatacgagtaagtacgagatcgtacttgatatgaactcgtactttcactatcaatagtatttttttggtatgaaatcgtactttttggtataattcacttcgtaattcgcctccagcaaagaaaattttgccgatcatattttttttgaaaaagtgtaatcttggtactgatgtgctctgattggtcaaataacaccaaataaccctcaattgttgttgcagcacgaagaatatgcttctgatgacggcccacacaagttcctaatacagagatttcgacatcctcggaccgaaaaaacgtctcaaggcagccgaaaatcattatatagggttcgggtattctcttcaaacttctggatagtgcctacgaaaggctactattaacagtaccaccaaataacaactttcaaaatacgcctaaaaaataggcgtattttgaaagttgttatttcggaacgcattccgattttttttaacgacacaactggttagtttcacatttattggcgacgataagcgtggggtcgggcacctaacatcaatagcatgtccatgggcgctcctccaaaagtgcgcttcggcgtctgggctcagcgggttgaaccctaacaaatcaccataaccatcttcgtcaaatcctggttgcattgtacaccgtgcagacattggagctttattgcgatgttataggggctccatggctttcggagggtccatattctctgttgaacgtcttgcactatggtaatccatgcagactagtcgtttggggctccaaccttgagctatagcttcgtataataaacttatgtggtacacactgttccacctaatgcccatgaagtatgtactgttggtgtggtgcataatagataggaagtctgtatggaagttgctgcggtgacgcctagcgaaccaaggactcggtgttggaggttgtcacttcacaatgttgctactcgtgtacatggcatagtgtcagagaaatttcgtagcgtttgggccatttgtctgggttttcatgttgggcctgccaccccttacttgaaagttgttatttggaggtactgttaaaggttatttcagtcagagtaagctctatttaagttcccactaaattttactgaagaagaggaacaaacattagaacttttgaaaacagcaaatttacaaatatactacagacgctggtataagggaaatggccaatctcgggccgattgccaattaagggccgattcttttgaccagtaaatgctcgatacacctcatcagatggaatctgattggtcgcttatagtataccatacgaatgtcagatgtcagttctatagtgaaaccaagtcaaacgaatcggcccttaattggcaagggctgtcatttcaggtgctgttgttcagtcacccatacggcgtttatttcagtgggctacaaggtacggaatagcctatcaaatcggcaagatcattagcttttcatcgataccctagctgtgtactcctttagcgtagatacagtcgaaaaagttgcaaaatcggcccgagattggccatttcccttactaaaaaaacccatccatcaaaattgaaccttcagctattcgaatattttatctttgtcataaaacatcaaaattgtataaaacacacttaaatccattatattgaggtataaagtacaaaaaaagcagacggaatacaaagattgtaattagttggtgtggtccatgttaaacgttgtttgattttggctgcctttttgtgccggctatgtatttcgttatatacaaactgccactgactgcccaacactcctggtttttattcgttgtagaaatggggacagagctcatcgggagcaatagccgtgagagactccattgagaagctacttctttcccggaactcagtaacaccgtgctccaactcgctttcagccttttcagacgctgctgctgcaggttggtgggatgtgggcagcacttggtagtttttgagtaagtcgattgtttgtgtgagccatcgtcgtcgtcccttcaacgctgcgtcctcttcttcgccgtggtgttggtgctgagagtcttgccatagcaggtgacgcgcacgctcaagagctttgagagcgatagatttagtctccatcttactttcacggttatcagcaaccaatgcgtctcgctctcgtgcaggtggaactaacgcacatactgcacgcgccgaagattcaagcagtttgggtgtggaggctgcggagcagtgctggcagagctggcagagtagaaaatgaccgtcgagttccatcacctgctgacggtttggtctggagtttgcgatgacggcaaagcactcgcacaaagccaccaatgctgccccccggccgctttcgttttcatcgtcttcgctatcgggtattgcaccgagtgcgtacagcaggacctggatgccgttttgtgccgtgactcgagctttattcggcgggttctggtgacagaggcaagcaagtgccgtagatgcagcctctatgactggtggctggcttacagcatctaccagcagctgtaagagcagtgtggacgcgttgctgtagccgatggtaagttgatttacagacgtgtacgcaaggtttgcgagcccagcagctccagctcgagcgagctgtggactacgctgcaggttggtagctgtaaggcatgcagttagcgccgttggtgcctcagcagccattaacgcgctctggttaaccacgtgattgtacgccatgttgcccagaagcttcgcagcctcggtttgcactccagcattcgagctttcccgaacgtatcgaatcacgatcggcaggaagtgcgggctcgtcgcgatttgagagcgtaaaatttcagaatctaagacaacatgtagcaaatcagccacaaaagcattggtagagatcgaagcataattcttaccatgacacagattaacaagagcgcttagcatattctgctggacagcgggatcccacggaaatggcaacttctcaaacttggtagtcatatcttcgtcatcatcatcgtcacgcttttctcgatttcttgggggaatacgaggcatcaaatgtcggacaagaaagcgaaccacgttttttgaggccagaactcgcttgttaggcacgtaaccagctagagcagcgcacaaccgcgaagcctcgacgagcactcgagcattctgagacttttcgaggacgtcgaccagaggtgttgccgcaccagccttcacaatttgctcgcgcatatccattccattggtaggagcggtcgataactgacgggatcttgtcttggtttgataaattgacaggtgaacgagtgctattagaactgagccggtgacaacatcgcccatcttctgctgcaacaagtgcacaagaaagggaagagctccagcctcagccacttgaggcgcctgcgatgcagggagcaacgcgaggctttgtgcaaaacgcgagaacacgtcgtcttttgggtcaatcacgggggctttcgatggtgttgacgagacgaggaaactatcgtcaggtgtctcgggtgacacaataaatctgttttgccaattcttctgcgcttccttgtcattcctctcttgatcaagctctgcctgaagctcttgcacgactaatttccaacgtttacgttcttcctccacggccgcttgctgggctaaaatctggtcacgcttcgtgctctgcagcatttgtgagagctcatggactcggacctgtagcctatttttttccaaagcaatcggtgatcattagctaaaacaacgacggggtgtcaataacaacaacttcacaccagcacagctcgtacttatgaacttgcgactccaggtctcggatctgagctaaagatcgattttctctcaagtctttctcttgctggagcgccacaagctgtcgcgagagctccagctctttcggagttggtacctgcgggtactcctgtctcgtagagaccagcaagcatgagcaacaacagcaatatgcccactaataagcataccaacgtaccgcatcctctggctcgaccagagctctagctggcatgaaagtgtagtggtcctacgcgagcactaaggctgcttggagaaagctgcaccaaaatagctcacccacagatgcgtcttagtatgcgattgcttcacatgtcagttggacttgcttgacgccgcggtggtcaacttggtcagctattaccccgcagccatttaaaaaatactgcctttacttgaatctgatggcaaagggcagtatttagagatcgatgcattgctgcactgtcgacaactgacaacagtctgttgttgaagacagctccagcaatcatcgacgcgcaatgccgcctctttgcagcggcaaaagacacgcacaggaaacatcgtttcattaataaatatcctttgccatttaatcattacataaatcaatacaggtttaaaagacctgcaatatatacttgaccttgcatgcttgatgagctatagattgctgaagttgagactaggaactaaactccagattcacgtcgcttagcaagcttagcaaaaaaaaaagctcgggagtgtctagaccaacttcgagcagcatcatgaatgcgccaagccagctaaaccagtcaccaattctggaaagcagtggcaaaaccaacacgaataccgcaggtatatactaatggaacttccgacatcggtcgattgcacgcttgccatctatcttcatggtgaagtgaggttcgtgcttgcgcaacaacctgtatcatgctggtacatgtagtcgccgtgatcctactccatgtaatgcagttatggcaaagattcgcttgcgtgcgctggtattcaaccagccaccaccatccacagctgtaggcaactggcccaacaaagcagcttgggcagcatggtcagcgacatagtcatgcattcattcatcgaagcctatccatgaccgtcggcacgttgaggtgcaaggcgccttgcacttgacggttgtcctgcttgcctacggcattttcactttgctctcaaactagctacgcttctagtaagttggcagttaaatcccatgccccacacccagtcacctccacgacgttgggatccgtggacggtcagtcaaaagcaccggcatcggctacgacgacgccgatcggagaccttgaggctgttgacacccgaccgcatcggtgaccacctcgtggcccggtgcatggcgctcgacgacttccaggcgcggaattcggcgaacgcttggctgcctaaagcatttgctgggccccgaatgagcttcgggccgcgccacgtgttgctcggcatcgtcaacgccgtgaacgaccagatccaagctatcgtggcgtatgaggacgagcccaatgcgctccttcagctagcgcagaccggatacatcgttcagcagatcatgcggttgaatcgacttctggacgtcgcactcgcggcgtacggcatctcggagccgcgcggcatggagaagtggcaaaccgtgttccagcaagagcgtcaggagcgcatggcgcgattcaggaagttggcggcgaacaaaaagcttttaatggagacgttgggcgacgaaccgcagcaactggagatactgactctgttagtctacgatttccggaaccacagcgacgacacgtacacggagttggagtgccaagtgatcgcggacgtgtacgagacttgtacgagactttcaggtatcgcagtgacgactgtcccggagtggttcgttccagcctacgaaaccaagcagagccggtggcagggaactcaagtcgacgtggagcgcttgtcggacccgagtgaggagctttgcattcgtcaggcctccgcgtggtgggagctacatcaccctcatgtgatgaagctctttggagcatgccacgtcggtaaatccctcgtgctggtgcgtgaaaacgcgcagtgcgttaagaagtcgggagcggccttgccgagtcgagacgttctagtcggcaccgcccatgttctccagtttctccatgaacggcacatcaagcctgcaaacctgacactcgagcgattgttttccacggaaaaggagcacaagatcatgcttcacggtggagaactgcttcggacgtccgtggactcgccgacaatgaagcctgcagtgctagagccgatcgatcctctctccttgtcgacatgtccagctttcttgaagaacgacgactggggattgatcaaacaggtatgtgctgacgacctcagcgctcgcgacgacgtgtcttacgtgatgaagcagctccaagaacggagcaagcctccgcaccgacacttctggaatcgcaaggctcatcaacttccaaacgaggtttccagtatcgtcaagtacacccaaagctacgtcgatccgacactcaaccagtccgttggttcgttgctcgaagagattacggatacactcaatagagacaacggcaacgctactttgatggacggctacgtgtttgagcgaatcctaagtgtgcaccaacagctcttgggctccatttgtgccaaggacgtggttcgttcattcgtggagatcctcatgcgcttccaggcttctttggtccatcgcgccgacagcagcgtgtcttccttctgcgtcgcatcatcccggagtgttgaacacaccagcgcctcttttcacgctgaaatcgacgccttgatatcacgctgcggctttaccaagagtgagacgacttcgatccacgactggaagcagcactgcaacttcctccgactcaaccaacaagaatcctttcaaacggctctcgatagtctcgtggacgatttgggcgaggaggaggagagggtcgaggcagcaacacttcttgtgtttgaggcgaccaagcaccgcagcagctacgaccgccaccagttgcgagccattgaacgcaccgccgcgagtatcgcggggctttccgatgatcaagagcgcattgtggtgcccaagtggttcatcccgcggtacgaagtcgaggtcggcacccagatcagcgcggggtctttcggggctgttcaccacggcaaatggctcaacgctaccgtcgctgtcaagtgtttgttccaaagcgacaggaagatcttcttgcgcgaagcgaatatctggtccacactgaaccatccgaacgtggtcaaactctacggagcgtgtcacgctggcaattcttcctctcctttgcgcagtctcgatgaatcggaacgccaaaccgagcgaagaccgttcttcgtgtgcgagtacgcgagcgaaggcacgctcaacgagtacctcaagaagtgggaaagcaggcaccagtcgcgctccaacgtgtggaaatgtctgtgcgaagctgctcgaggacttcagcatcttcacgagagcggcatcatccacggcgacctcaaggggaacaacatcctcgtcggctccgactatcaggccaagttgacagacttcggtctgagcgctttcgcgaaaaagttgaaatggaccggaagcaccaaaaccgtttgcgctatcaggtggaaggcgccagaacgcctcgggggatacgatcgcgggccgtccttcgcgtccgacgtctactccttcggcatgtgcatcatcgaagctgtgaccggcacgttcccatggcgcgagactatggacgaagatgtggtcatctccgaggtgacgcaaggcaaactaccccctcgcccggacgtcttcaacgacgagcaatgggatcttgtgtcacgcatgtgccgcttgaaccctgacgagcgggtcaccatagctgcagtcgtggtgttactggactcgctctgttgaagcaacccacacaacatgtcatgtagaatagcaaaacaacactagttaataatgcaaaaatgtcgtatttattgaagaaattcgtcctgggcggttgattgctgtgcttcgcttcacgcgaaaagatgtatccgaaggccgcactgtctggatagggaagcaacaaatatagagacgagacctgaagcagttgatcgctgccggagcaccacaccaacaaaataccagcaccccactcatttatcattacatcctcgtgacacgcttctcactctttggcacgggcacgactcagtcagtcttcacgcgcttcacgtcgtcatctccgtcactatcactgtcatcctaaacagcatcacaaacaaacacaaggcactacagtcagtacaatgcaaatgctagcatgtcaatcacagtttcgtacctcttcaagtgatcgcttcatgccgccgctgctgctgccgttcatagtatcatccgagctcgcccccttcatggccacgtctcgttcggcaggaatcaaatgcgcgggcgtgacttgcttcgagttcgccatcacggtatcgtagcagtacttgtggaagatggtatcctgctgctcgtttccattcgggccggtgttgtggatcgtgccggcaactgcgttagtgtacatccagtcttcttcttcttcgtcccagcttttagagaaattctcgccacaaatccggcatcgagtgattgtctcgtccactggaactcgggcattctcccacgaagcctgctcgcctgcattcttctcgttctccttctgtgtcctgtcgaagaagctgctgcttgtgctctcgcgaggtgccgtgtctccagagaagtcggccacccactggtcttcatccgggtaccacgaccgtgacacgccccccttaccgcgctccttccgcgcgcggttgtactggaagaggaaatccaggtgagcatccagttgggcctgctcacggaagcgcaaaccactctcacgacacactagaggtaatgctgcatacagcttttggacgttggattctacacggtccttgtgggccacaaccttgtcgctgaaccacatgcgtgacgcattgtcggtgcgaggcgcttgctgttgctggtcaccttgctgctgttgctgctggggttgttgggcttgctgcggctgcgctcgcgggggtgacggcccggacgctgcgcctccattcgacattcccttaagcttctgcaggatcgacatgactgctgctgcgtccggagctcgaggagggtcgttggtgatttcttggactggttgttgcggcggagagggagcacgctgcttccgcttcagtagctgcatcaaatgagcaacgttagacgacttggctgccgagccgtcatcactcttgcgagatgtcgagcttgcacgaggtggctccactcgaggagcctgtgatggagggggtgcaacctgctgctgctgcggtggaggtcgcgcacgaccagcacgtgggtcatggggaggtgaagggcggcgggggtctcgagccactggggcctgctgctgctgcggaggaggctgctgtctactgggagctctctgaggaggggcactagaagcaccaggtcctcgtgctgcgcctgcctgctcaaccttcgaggcggcaagaaactcgagcagctggttgtaataatctgggttattcgtacgcacttcttcaagactcatgtgctccgtcgggtgaatgcccatgtcgttctgcagcttcgtgagcagcgaccgcagctccatgtcttgctgctgctgcgcgagcttcgcgccggagttggcacttgtagcacgagcctgttgggccgacttctcctggttgaagctcgcaggcgccgaccgagccgacggatccgcctggtgcatggcgcggttcgcagcgctgcgcatctgagcgatggcgtccttgtcaaacagccgcgtggtctcccatgtattcagcacatgaatgaagcgcttcaggtccttgcccgacacctgcaagcaagtatccatacacagcacaatccaaagcgtttaggatcggcgacaagtagcgttttattcttcgtacagcagctacacaactcaaagtaaggcgttacctggcgcacacagttgcagtagagcggcacgatcttggcggcgaacagcgccaagtacgggcctctcacgttcttgaggatcgagtctgtcaggtagaagatcggcagcttgcagttgggcgcaacctgtcaccacacaaaacaccacacaagacaacatcagcttcacggctcactcgtagctactgccaacctgtcctactaggtagccgccgcacacagcgagtctctccatctctacgtatcacgtctactcaattgcacattggtgcagaggcggcaaatggactgggggtgtcgagccgacagacagtaggcagctgactaactggtgtgcatatagtgcgtggatggatagatagagagacgggaggaaactaactagacatggctccgtgacaggctggaggagggagggtgtgtgtgtgcatttacccggtggatcttggtttccaggaagctaacaatctcgggggcgaactgcgtgcgctccgccagcatcgtcagcgcgttgatcgtgtccttggccgggtagtccatcatggcgttgatctgcgcgtcgaactggcccagcagcgactggatctccgacttggcggcggcgctggaggaggcggacgcggagccggagctggcgctggcgctgggcgtggacgaagcgagctgcgccatcgccatcggtcgggagagcggcggactgggggcgggcgacggcgaaggcgaaggcgagggcttcggcactgagcctgcttgagcttgggcctcctggctggtggctggcttcttggtctggcggaatacgcgggcgtttgctcattcgttcttgcaggtctgacccaagtccgtcacagaatctgaaaattacccctagtatcacatactaacttccacgaaaatgatcaaaagtaacctatttatatatctcaatttacaaatctgcactgctttgctacctcgtgcactgataaccgtgacgatgctgcgccgcgttggtgctgcccgccgcctgccgcgctcgtggtcggtccgcgccgcgtcctccagccccagctccagctccagctccagctcgcccgatgaccagtggaagttcacgcacgtgagcagcgacggcggcgccccgcgcatggtggatgtggggcgcaagcaggtcacgcggcgctcggccactgcgcgctcgacgatccgcctgccgccggccgtgctgacggagctgcagcgcctccagcagggcggcggcaagagcgacgacgcgagccagttgctgggacccaagggccccatcgcggccaccgccgtcatcgccggcgtgctgggcgccaagcagacgagcgcgctcatcccgttctgccacccgctgccgctcgaggactgccaggtgcggctgcaggtcgtgggccccgacgccatcgaggtcgagtgccaggtgcgcgtgacgcacaagacgggcgtcgagatggaggcgctcacgggcgcgtccgtggccgcgctctgcgtctacgacatgtgcaaggcgctgagccacgagatcgtcatcgagaacacgcgcctggtcgagaagaccggcggcaagagggacttctccagcaaatagttgcattgccgtccgtggtgaataaataacatagaatatataaacgagctttagcgcttgcttcagccgtccgagtcggcgtagtcggagccgagctcctcctccatctcgtcgtccgagtgggttgctgccggctgcggggctgcagtggacttgtgtgtggcggcggggcggggcgagctctcttcgacttcctcgtcttcggcgtagtcctcttcggcgtcgtcttcgtactcgtcggctgaagcttcgaccggcttgtccttcttgggggagctggctttggggggcgaagcgggcgcgtcgtcgtcttcgaactcgttgttgtagtcgtcctggtcgttggcgtacgcctccccctcctcctcggcttcctctggttcgtccgccacctcttcgatctcctccttgcgcgcagaagttgggggctcgctacgcgtagtcgtcagaggaggcactgggtctgcggccggcttctcttcctcgccgtagtcttcgttctcatagtcttcgtactcgtcttcggtcgctggcgcctccgtgacagcagcggaaggcgctgggatctccacaatgggggctgcttctggggcggcagattcgttgtcttggtcttcgaactcgttgaacgcgtcctcgtcatcgtactggtcttcggtcgctggtccctcgctagctgcaacaccaggactctcgattgcgatctcgtccggcggagactcgacaacgtcaactgcaaatttctccgaggattcaggaacatcaacaacgcccgcctgctgctcaggctccactcgaggcgtttccgtcgaaggagcttgttcctctaccgcttcgtcttggatcgattcagcaggtgcggggtcaacaagagcagtggctggcggttcatcttccggtggatcggcgtaatagtcgtcaggctcgatggaagtttgatcctccggagctaggtcgactgcttctgctgggtctggattggctgcctcgggcatcggttcctctttcatttcggaagtatcactggagacgacttcacccgtgttttggaccgcttccgttgctccgtgatcgtcgtcggcatcaagatcgtcaggataaacggggtcatcagcactttcatggactggaagctgtgtgtctgatggcgcatcgacttcaaggccgccctcaggctcggtatgatcaggattctcagctgcaaccacgacggtaggatcttcactcacaggggcttcaatgggagaacttgcaggtttatcagcggattcgacggtaatgatcttttcactggacgcttcttcttcgacggcgacattttccatgacctcaggtgcatcttcgttaaccgagatcgggtcgtttctctcttcgacgacttcctcctcatccttggcggcagccttcataggcaagtcttcatcactattgctagtggcagggtcagccacgtcgggaatttcaggtgtgaggtcttcagggttagcttctggtgtagagggctcatcaagaggcgagttagcggtggcatcttccagagtgggttccaaagcaggagcagagtcggctgtggtacacgcattctccacatcttcagattgggctgcgtctacagggacggcctcagattctgtggtttccgtcacggagttcattgcatcgactgcctcagactcgtgtacatcgggttcaggtgctgctgcttccgttgtttcagcttccagtgccgccgtctccgttgtttccagctcaccaacatttgcttctgctagttcggactgtacaacctcggactcaccagattctggtgcaaccgacacaggctcggattcgacagcgcttggctccggtgtcactacaatctcaggctcgacaagttccggttcttcggccgtcacagcttcggattcaatagcctctggctctgccgccgacacaatctcggattcaacagcttccggtgcggcagcatcgggctcaagagcttcaggttcttgacctgacacagcctcgggctcgacagctcctgaatctgcagctggtataatctcggactcaacagcatctgggccttcagtcgccgcagcgtcgggctcgacagcttctggctcttgaggtgcatcagcctctgatgcttcaggtgcgacagtctcgggctcaaccgcttctggttcttcagctgcgtcagctttgggctcgacaatatctggctttagggaaggagactccacaggatccggttcttccgacttcgtaaactcatcattcaccatgtctgcttcaacgcctgtaggctctgtaagttcggtctccaccgatacggcttcgacatcattactctcggctgctgcttcgggatcagttatcgctacttcagaagtctcaggcttggcttcgagttctgcggcttcgggatcgacaacttcagattccacaaacgtctccgttggttccacttcgactgagttttctgtgtcgcagtcttcgggctttacttcctgcccgtcctcagcaacagtttctgcactaggatcaatttcaccctcgatcagctgatcactttcagctacgtcagcatccggaggggtttccaacgtagtgctgacgtcgacgtcagcttcaacggcggcatcttcagcaacgggagtggagtcaacccgatcgctcgggtcaacaactggagtagttgtatcctcatcaaaaccttcatcgtagccctcgttacttggagatgcgtccggaacctcgtcgacgtcaggggaaggttctgcactttcagcaggaacgtcacttgcagcggattctattgcggggctatcagaatcggccacagcattgtcatcactagtggcggcttcttctgaatcgcccattggcacttcttcattcgtttcaggtaatgtgtcggacgggaagtcctcctcatacgtcgtcgcatctgggctcgactcaagactcggagtgtctgcatcgggtgcgttgatgatgtcgtcgcttgggttaccagaggctgcttctggagcatcatcatctgcaggctggccgcttgctccctcgtcgttacctccacagatttctgctgttgcctccgcgggttcggccgggtcttgattcatttgtgtttcgtcgctagcaaatgctgtggctgggtctgcctcagcctcctctgtttggaattcaggatcatcataaacaacctcagcgctctcctctggctcggcgacatcaataggaagggtgctttctgtctcgaggatttccgccgccgcagtttcttcagtttcaccaggaccttcttgagcaagtgaaccattaaaggctgcttctttcagtgcagtagcatcgtcttcaacttcatcaaagtcggcgtccccatactggttctcctctcgcgtagcttcatctgaaggctccgctgaagtgtctgccactgcagttacagcgaccggactttggtcagactcaggtgagtctccggcaagttcaccgccggcctgcgtggaatcgggaacttgctcagttacaacatcttctgctgcactcggctcgtactcatttgcaggtgtttcaacaacgtccgaaatcattgacggtggctctgattccggtgcttcattcgctggggcaaggtcaactgcgctttcaggcacaacatcctcatcagcattatcctgagcagaggcagaaccctcctcaccgatcacttgttcgtttggagcagcagattgaagttcaggctcggccgatgatgtagtttcaggctcaggtgctggcacttccgccgcagtgacaacttcctcatcaattggggaatttggagtcacatcgtcatcagcagccacggcatcaccaggttcttcacctgacgcgtctacatcatttgcagcaatttcatcttcgatagtaggaatcgactcgctttcaatagcaggctgctcttgcggctcatctgcctgcaattcaggttcagaagagaccaccgcagattcatcaaagttgctttctgcagctgaagcgccctcagcttcgttggtagtttgttctgacgatggctgaacgtctggctcgtcgtccttcaggccttcatccatttgtacgactacaataaggccagaatcctgggtcgtcaatgacggaggtacctgctcttcttctccaccattatcgaagtcgtcctcatcatacgtcgctggctgagcactgacatcaggttgttctgcagcttcttcctgcgtaaggtcatctgttgggattgtaatttcaggaagctgactggcatcagtatcagtcggctctgaaggagcggtagtgctttcatcactgtcagggagaggatcagatcttccaacggggtcttcagtggtagcatccgattttgtatcgtctccgtttgcattctcaccggagttctccgttggtgggtggtcgtggtgcttgtctgattcatccacggcctgctggtcttcggcagcctcgtcctggagcacagtaccttcaactgctgggacctcagcaacagtcccggactcgaacatctctgcggaatcactgggcccaacttgttgtagttctgaaggttcatcggttgtctctgtatccaaagcttcgtcagcatttccctttgatgactcacctggtgcagtattgtcgagatcttcagccccagaggccactggctcgctcggagcttcactttctacttcaggtggtgaagacgctccatcggctggtgcatccgtttcaggtagtgcaaccggttcatcaacctcagcgtcttcatctacggttggttgctgatcaggtatctggacttgagattccgagtgattttcttgagcaacttcttcgtgtgcaccgtcgtcgaaatcgtcatcttcatacgcctctgactgcacgcttagctcggaactgttagctgttagccccttggaatcctcctcctcattattggcatcaggtgtcgcgtcatttgcatcaacctgagcgtcggcaacttgagaagtttcttcatcttgttcctgctgcggatccaccaagtcagctgcctggtctacaggctcagcagcttcttcggccggaggggagacggaattaacattagccacgtcttcgcttggatctgcttctatgtggccctcctcatcgaagttatcttcatcataagctgcagactgaatgctaaccacggacacatccgccaacagggttttgccctgctcgttatcttgctccgtcaaaggtgccgactcattggcctccaagccctcggtagcagcttcagtgacttcagtcgagttgtcctcatcttgttgaagtgggctcggatcagcttgtgcttcttcagatgcagggtcaacgaagtctgctgcttcacccgcgagatcggttgctggggcttcttcctcctcagctgcagcactttgaatgccagcctcagcgtctcccgcctcattctccaccaccgttggctcagtcaccgaagtagtagtatccgcttctggactagactcttcctcgagggtagcgccttctgcacccaccaaatcatctgaagtatcattaccgccggcatcttccgtggcgacgggctcatttccaccactgccatctaagttgctgtcatcagtcggatctggtacagattcaccttccagattgggggacgtgctttcgttctgttcctcttcggtgttgcttacgagtacatccggatcacttgtagattcctccgagataacagcgacgtctgccgggtctggctgcggatcatttgattcttctggctcagcaaccgcgcactcagtttcaccaccaccggcattgtcatccacatcgccaccctgcaccgcactttcagcctccgcttgctcctctgcacgtgagccgttctcagctggggcatcaggaggattatcattttcagtatgcacttgctcattttccgtctcgatcacgcttgctgctggttcagactcaccaactaccgatacaccagaagtttcgtctgttgtttctggctcaggattggcctcagtatcagctgcagggacatcgtccgcctcggcttcttcagcatttggtgtgtcgtcctcatcgaactcgtcatagccatcgtcgtacaaggcttctccactcttgctctcctgcagcggaacatcatttggaggatccgatgctcccgtgtcatgcataggagtatcttctgcatctgctccggcttcagctgtcatatcttcatcatcgccgccgttatcatcaaactcgttgtacgcgtctctatacatggcatccaccgtcgcacttcctccacttggttggtcttcagcaggatccggcattgcactcggctcctccaaaggcggtacagtagtctcatgtgcttcctctgttgcctctggtacgtccgttgcagcctcgacattcttctctgtggcagcgtcaggaacagattcctcttgcggcggcggagcatcaacaggggaagtgatggtctccgtcttgcttggtgttaaagctatcgccgtttcttcagccgtaacattttgctcaggtgtgttggatggcgaattgtctccttgtgcagcggggtctaccacttcagttggtatctccgatggtgcagtctccacctcaaccgcagcagcttcgatactattcgaaacctctggttccacttgctgtgtgggtgtcgtatctgttgaaacagggatttcatcgactgtttcgggcgatgcctccacagtgacagcatccgaatccacttgaagcggctcgttaatcgctggggtgctaggcggaacgacttccgcaactactgcagtagcaacagactccttcaccccctcaacttccttcttaccagcagatttcgtagcggcactcttgtttgacttgaggacagtccgaggcttttgctctgaagttacctttagaggcacaacgggccgggaagcgacttgcttggcccttgcgaccatgggtgcttgatgaccagacggagtttggtgaccctcacttgctgcagcttggcgcttggacgccccggaagtcggctttgcaggcctgacctcggttgattcccgtggcgacaaaatctccttcggagtgtacttcggtgtgctgctgactgctggacgcgacttcttggaaagcgggcgcttgtcatccgaagatgactcacgagtctttcgtgctgtcttcgagctcgccgaagacttctgccttgaagtgtggtcgacagcgggaacgggcgtcgtgctaccgtttgccaacgtcgattttgctttgtcaatcatcttgtggagcttttcagcgaagctcaatcgctctcgctctcggatctcctctttctcccgcggtgtcagcttggagctggaggggatgccgcttcctgcacgagatacgttgtcttggaacaactgcgtggcgtagtcgtttagtgactcagaggaggtgttgttcgacctcctggtcaaagacgagtagcctccagcagtgattcgcttttggcgcgccttcgctgctcttttagtcgcaacacccaagcgctgaggcgacggatacggcgagcgagtctctctggacactcgaagctggttctcgttctcaattttcacctggaaggcagctcggggcgctgggttcttcttcttccgctttgctcctcgaggttgcctcacttcgggttcgtacacggcagcgtggtgaggctcgtcattgtcgtcccagcgattctgacggctcgacatgaaatctcggtgcgaataggccggcccatggtccacgtaatccgatcgactagagtaaggtttgctgcttgatggggcatgttgctgcggtggggcccaagcggattcagcggacgccaagtgtgctcttaactgagctctctttgttccataaggtcttccgttggcagcgctgggtactccctggattccgtacgcgtcaaatagctccgattgccggtcctctttcgatagttgtttccgcttgctggtggagccaaatccgctgtccatacctagacttccgtcaagtatgacaaggctgcttggctgctgtggagccgtagcagccccagggaaatcacgagcagggtagccaaacgtgctcgtatcacctccaaacccagaagctccttgtccgtatggagatgccgcctttgggaagccttgcgtgtgtcgataaggtgtgctagaggtgtaggcagccccacggggatacgaaggggctccataccctgtggccgggttgcttttgcgcttcccaatgctggtagatcgacctcgaagtgagcttttcttcacgggctgcctatctgtgggagtatttttaagcgactcagcctcccgtaaaatctctgtagcggtgtccttgattctcttcgtgggcgattgccggacagtacaaagtgcaatttgctttgacgctgcagcagagtacttttggatgcttggttcggtagggtatctcgccataacagttgaaagttcagctattccattgagacccaggatcaaggcagctgcacgctttccactggccgccaaactggaagtgaaatacacacaattatccagataaatgagttgctcgaacgcacaattagtttccaagccacctttatctcactcatgatccgtaccacatgagtaagctaccgacagcgcagcaagccttcttgtcatcgagtgaaagtccttggcgcaacaagaagagcaggagagagatcggagccatatctcccgtaaagtcttcctcctgctcaccacacaacagattcagcgtttgaagatcgtccagctcgcacagctccagcagaactgcaacatgacgtcaaaaccatatcgacaaaccgagtcaaaacgagttcgatatgtatacatcaaaggcgagcacgttaccttcgcaagcgtaataatgtacttgccgcgtgtgtacgctgtaggttttgtgatagatgagagtggatagcactagctgcgccacttggtactcgataagaatgttcaaaccagactggactcgcgtaaatacagctaaagctccacaggcagacgcttgaagaatagcgtcctccgcaaacgcattcatcgcttggatcaccaactccacgattccattgcgcagcaaatagtgtgtgcttttcacacacaaaaagcagagtctgcgcaggagcacgaatccgtagcattgaatgactgcgtgagactgatgaaacttgagcgcgtcgataattaaacgctcgccgccatgtttgtgaaccagattggctgtgacttggggatatgcacgcatctgcttgaccaacgttgagagaaccgacttggtagatgccgagtcacccagtcgcttctccagtagctggagcgattcaataatgtacgcgcgctcagcagacactcccgcaggagaagggtcgggaagctcttcattttggcggcttggggggaaggcttcgttgtgctttggctgctcaggtctgggatgatcaaactggtccgatgtttcggctgtcactggctcgtcggacttgtcatcaccgttcacgctctcttcattttcttgtgctacatccgcgccactgaatgtatcttccgctgggttgttgggagacttctgtgcttcctccatttctgcatccttttcgtcgttctcgtcctcctcctgctgttgctcgggttctacatcgttcggcgttttctcctgttcctcttcgtctgctgcacccgcagcctctgcctcgtccttctcctcttccttgggctccagaatatgagcgaggggcacgtcttcttccacctcgccgtcatcgtacgcaatggtataccttccgttctcctgcacatccgaaacctggcctgggtaatactcttctccgccatcgtaacgacaaagcacacgagttccaacacaaatggtgccaggcacatgctggcgaagaaattcaggtcgcacatgcgtctccacttctccatcgtcgtacaaaacttcaaacgtggggccgtctgcgctgtcaggctctgcttcgcctgcatggacgcatcgtatccgccccgggtaccacatatcgtcggagttttcatcgtatagaccgtctacgcggtcgccaacgcgatagatcgctgccatgtttcgtgtagtttcgtcgtcggaccccactgtagcaggctgcaccagtcaggtacttcggacacgctcccttcgtcccagccaggctatgttccacaggcgattgcagtcgtaagtggcgtctctcgctgcaacacccgctcgatgcgataaccgaccaagagccccgttcgtttccggccaatattggcgtcgacccttcatttccaaggaaaactgccgccccacagcaacatgttacccccaactagcgatcgagttcttgcttgacggcacctgcatcaccgcaactggccaacaacaacaacaccgcatactcgcatgctacgcgatcgtaccggtgtcttcagacgaaaacggacccactcttcacctacaccggtattgcagccaatgcagcatcacggagcaatgaagtacaggtcgacagagggagctcaatgtcagtcagccacaccatgagcaagcaacacgcagggacataagagagcagacatgaaaaataaaagcaaataacattccattcgcaaggacctcggaccgaacgccccacctctccatctcttgtttctcggctgtgctgtacccttggaccccctcacccacggagggtcccattcgacctcgcaagacagagacgcaggacgtcagcgtcgcatagttttggggtttctgaattgggcgtctcagctcatggacatcatgggctgctgctgagcttgtaccacctgcggttggcgcgccttgcccgcgcggatgtcggctatgagctgcagcacctgctgccggtcggcttccacctgcgctatgcgccgctcgacgggccactcctcgaacttgacctgtatcttggccttggcctcctgcagctcgcgccggtcgctctcccgcttgcgcgcgatcttgtcgcgcaggtagtcgcactgcgagacggcgcagcgctggcccagcggcgtctggcacgtcttggcgtggaagcagagcaagccccagatcttggagcacatctcgcagctaaaaccacgcgcatcgtcacgtaaatcagaggctctgggagattaaacccacggcgtagtttaatctaatttgtagcggcgcacctctcgatgggggagaccttgcggcgcgggccgtagcagcgcacgaagtggtcgatgctggccttgaccttgtggcagcggccgttgagcgcctcgcacttggactcggggcacgtggccgcgtgcaccagcgcctcgttgtacacgcggaacttctcctcgtgcgaggcgccgccctggtcctccatctgcacgtccatggctcgactcgaggcaatatagacaatcgcttcttctgcttgatggagtttgaccgcgcccgacccggaaataacaccacgcgcaaacgttcccacccatgttgttgcgttacaacaggactattaagtagcaaaggctaaaggggcacttaataacaacaatgggataagttatgacaggatactagttttcagtgtataggaaattatgcgcgtattgacagcaaatacattttttagcaggctaagaaacagatgccgatgaaaaacaaaagacggagtcccagctgggctcttcaagcagagcagagcacacgagggacggcctcgagtcaacgagcgagcgctcgagttaatgatggcggcgtgcagtgtacaagcttgtactacacgacgcccgccctcgtgagaagcgggcgccaaccgcatcgcatccgtggggctgcttccgttaccctccaacgataccattgcctgccctggcgtaacttgcagctcgcgatccatctaccgctcacctatggcggtgcgagtcaatgcatgctttggatggacagtggtggggtggttcatattgatacttaaataggtgcgcggtctactacagtgcacatgtagctcggcttgccacgcaggatccgggggccaacgccgtcacgtcaaaaactcgcgaggtgggggacgaacaatacagagggcggtcggtcagtcgccagcgccaccgaggctgcttcagccgccgcaacattaggccgagcaagtgcgggcctcgggcaggaagtgcggctcgtggaggtcgacgaggtggcagctctcgaccagcttctgctgctgcgggtccaggtcgctgtaaccctcgaggcacttgagcgggatctggcgcacagccttgtagcactcgacgtggtgccagttgatgcacacgaagccgttgcggtgctgatagaccacgcccacgcgcaggcgcccggcctcgatggtggcgtcgcacgacttgcagcaggcgtgcgccttgcgcgtggcctcgatgatgtacgtgccgtccttggtccagggcgactccatggcgctcgggctcacggggctgccgatggggctggcgctgcggatctccacttgggtcattgttactacggtagttacgatcgagagaggggtgtgcgcgcgagtgaggcaaatgcgaagtgagctcgcctttgctcgcttgactcggcgagcagcgcggctcggccagctggcagccaaacgaggcgaagcgcggcgcgggagcttagcggatttcagagacgaggcccgggctcacaagagagcaggcgctgcaacggccgcggccatagtgagcgcgagtcaaacaagacggtccgactgcgacaaccaccgcgggctgacgccgcggctgtcatgccgctggccggacgcttgttgctggcagcgcgctatgctagacttttgctggcaggcaactcatgctggttgttgctcgagctaatgctaaatttgctcggcgaaaccgcgctctctgaatatttggatcccgggcgctatctctcgatagattctagcactctcgccgccgcatggcgagccgcgccgtgttacgaaagcagctgcaattgctgggtgtgttaggggctgcgtttctgccgctctcgttccgacgtcgagtgcaagcgatcgaccacccggccccgatcgcgtgaaaggcgggccccgagcacgggcttggccgcctatcggccgcagattccgctcgccatgcgcgagaccaaccaccagcacctgtcctgccagcttgtttgcttggttggctcgacttcggagggccgtttccattcagaatttcgctactagtggcggttattggataccgttgcagtgcacatatcgcggggggggggggtcttattcatgcaaacttctcctatctacacttggaacccctcggattttcacgcacatctagtgcattctcgattcaaatgataaatgatccattgctcatgcatgtcgccgccggccgtggccagcctgttatggtggccactggcggccaggatatccgatatctgcacccacgcgcgatggccgaccactgcaacgcgttgcagtgcgttgcagccggcaaacgagccgaatcgacagttgaggcgcgcaggcgcggtgctcgcttcagacaaggcggccggccgggggggcaaggattttgcggggacatgagtgctgaaacggccccccccggtctcggcgactcgaatgaaggctgcttgctgctctaccctaccggtagggtaggtagaagctgccggcatgcatttatttcgctgctagcgcggagcgatctgccgtgtcggcaaagaccccttcagcccctgcagcgcgcataggcctcgcgttgtgaatctgcccgcagaaaagttagctcgttgtcgtgatttggcgttcacaatcccgcccgctgggcgggagcttcaatctgcacagcgcgctctgcttcgtggtctcgccactttctgcccgcgatgattcggcctgcggctgcacgacgcacatcgcggcgacgcatctaattcaacaagcctcgccgtagaggccgctgccgagcaagactcgccaagccaagtacagcggcatccgatggcctcgccagccggcttcgatcaccaccttaggctcggcagcaacatgatcatgggcctgggcaccttttcgtcagacccttttcaccgctttggctcggctcacgccgctccggtctgccgcaacgctcacaacctcacgtccaccgagacccgcacattgctcctgccagttggtgcacattttgtaagcaagcgctcgccacctgggcgacgacgaacgctgcgagtgtcaggactgacgcatggaaccgcatggccgcgaccgacttccgctggtccagctaaagccagatctaaatgagctcgtgaagaaaccactgcaccgcactgcatggctcctttaacagcacgccagcctcgctcaactcgatgtccagaaatggcaccccctccccacatcgcatgctcaatgttcgagcctcgaacatgactgaaattactcgatacaccttcgcgtccatagagcacactctctcgctgcaacccaggctcacttcaaggcagctctcgccgatggaaaggcctcgtgtccgcgcactgcgcggcgcagctctgcaccaggtccctcgcggcctatcttttgccagcaagacgatcccgcctcgaaccgcaccagagtctgcgtgtttgcttggccgcctcttgactcgagaggcttgagcacggcaactttcaagaccgacaagaaccggtggattcgggagtctcgacgagaccgtcggtcacttcaaccacggctgcccaatgcgctgcagctgagaccgagcaatcaagcgcggaccgtcggatcctcgcaaaatgaagcccgtccgtgacttctttgaactttcgggacaacaatcgcccaagagtgccgcctcgtcttcctgtccactgctgtgcgcaacacgatgcgcgctgcgggccgcactgcagagcggcactgcgggttggcagcagcaacgcaggttgctgctttcacgcacaacttcgcgtttgcacgagccgcgtcgactgtttagaccaagtacatatacgaagctctgcccggtaatgagcacgagcagcgccttagaaatcgatttgcaggaaatggagctcaagtcgatattaatacatgtacttggataaaaatatgttcacttcaagaaagccacttggaactttatcaaattttgatttgattcaaagctctcgtggaagaggaccaagactttcgtgaagcccgtcaggctcatttcgtcctcgtctcttgtacaacactactcactcatagtactccgactaaaaagaggtgagttaagcggcaacgagctttatcaaaacttcccacaaacatactggaggcatatctaccaatcatatcatagattatgtttcaagcaaacatggcaacaagacgggaatgtacatgtatacattttctaggacataataagacgtcaaaggatttgtatgggtacttctttccctgaaataacgccaaataacattttgtttcagccaatcatatgagagatcaaggtaaagctaaaggcgcctaagatatttagtccattctccgtcctctaaccgagagtcctgtcggtgagttcgtcacgctttacgagcctacagcatagacctgtcatttcgactacgttatcgcggacctaacagatgcattattcactcatcaaatcgactcgcactggcttttaaactatttacgaaattacaaaactagacacaatcacgccaaaattcgtacttacgcggaagaaatcggactttaacgggtgtgattatcccatcccccattttgaaagttggcgcgcggtgggcggacggacggaggcaacgagcgggagggcgcttggcgtaccggagtaagcagcgggctgcagcggcagcgggcactaccacagtgagtacatgcatacgtttacattaataaactactttacggtttcgggagttccgcctgttgggataactggtgccttcagggcagtcgagggtttacagtacggaattaggggtagactggtgcttattaggcgttcatcttctaatacaccaagaatgtgtgcgaacggcgcatttagaccacctaacgctgcacatagattaactgataaacagcacgcggcgtggtgttgctggcaatcgtgctgtattcatttgcaggaatcaagcattataatacaccaatttgagtagtcgcgtgctcaacttaagttactactacgtagtagttggtcgaattaagtaaacccaggtgcatcaccagcgcgcgcatcgaggcgtcatacttacgactttttatgttttttattaagctgattaatggcaggatcttgctgcagtccgacactcgcttccataggaacgatagtcgcatcagccaagtgacaacaatgcactccaactcaaatcaaaatcgagcatatcccaggtaccctgactctcgcgcttcaacaaaacaattttagaaaatgctgctcgaattgcgcgcagcgcacaacagcatggtcgtgcgcaatttcgaattactgttactaagtactgtacgccatgcaccaagagcaataacgcgttataaatccagatgaaagatgcagagtaggcaaagcgtagaatagtagtgacactggcaacgcatgcagctttcaaaataaatgcgcgctgctaccctagatacgtgtaccgtaaactactgcagcatgcacataatgcagcttagtgtagacattgtcgttagagcaatatatatatgaagctattggccggaccccggggtcccgcatcatgtaccgatggcgaccggaattatttatttttatcggcggggcagtgataatatatatgttgtgacaattttgtgataatttttcgagtttagctagagctcatttcaccttcaagcatctagcatccagtatgaagtctaggcgaactggaggtgcagaggttcctcggcgcaaacgtgatacttaagtattgaaatcgtcgtgaccacaaagctgctgcattcgttcgttctgttaagcgtcttggtgaagatatgaccaagaagattcaagctgactgctagaagctagcgcctactacagcagcagcggcgtcaggcacgcaaagttgcgaactctgcagctctgtgcaactcgatagtcgatactaccagagatacatagcatcgatacaaacatgcagcacttgaatttaccgaatataccggttgcttatgacagctggcgggacaagcggggaccccggggtcccgcttcatatgcatatacacgatacacaacaacctaaccatcgaagacgcacagtcgttaccgatccgtattgagttgagctaaatttactatgtctatttgaactgttatcgcgcaaaccagcattactacatgtagcgcggtgcagtgcgtaaattcatgctggcaaagttgcagtctttcagtgctaacgtagtaacaacactagagtacggtatcgacgacagctaccagtttgcaacgctgtataaaccacacccaatcatagtttcaatactttagttattacttcaaagtaagtaaacacgcaggtcactacactgtagtaaggcatgtccgtgacaatgtagctcgcctcgcagaaacgggtgatcaataatacaacggcaacgatattcagctcactcgatgtttaggtactcaactttgcatcgtgagcgacatttggtaattagcttaataggaaaatgtattcctactcatttgctactaaagcacgaagttatagcaacgaatatgtgtcaactgtatccgcacattattgttatggaaatcaaaatgatgcatgtactttaagctatgctattccagcaacccgtggtcaaagcgcccgcgtagcgggtgcccagagcgctagttccccttctcttatagcagtttccgtgtccgtcacgaccacaacgtgacaaaattttcattggacgaaaatacattaagtacgaacttgaggatggcgctacactttccttatgttaaccgttctttggtttgccgtttgtggagctatctgagctgtctacttaaacctgttgccaaagctacagcgaccagaatactgcgacactctatacatatagtaaaattcaccaaggtccaacaggtgacatgtaaacaactctagagtcgatgaatattgtcctattcaatagctatgccacccgtgcggccaatgtaggtttataccagaaacaactttcctcactgtaaactacgagttcatacctaaaaacaccaggaaatcataccaaaaaatacgcgttcatacgagtaaatacgagatcgtactcgtacattttggtatgaactcgtacttttcagtatgactagttgtttttggtatgaaatcgattttgctttggtatgattcacttcgtaattcgcccagatcaaagaaagttttgctgataatatttagttttagaaaattgtaatattggtactgacatgcccaccgaaacaacgtctcaaggcggccgaaaatcattatatagggttcgggtcacttccatacaagcttcatgatagtgcctacgaggggctactattgaggtgttatttccgtcagaccatgcaaaaccattgaaaacacaaaatagattatcaaagttatataatccccatctttatcgagacacatcattgtacctaaaaatgatacaattggtagacgttcctcaagtaagatcgtccggcgcatgaatgtggtcgtattcgccttgcaccaccgaatccagaggagggtgacagaaaatacagcgctttaggccaacacatattgagttgaggtagtagcataccaggtggggttatgccataccctttacgttaaatgaggacagaccatactggtagggtcagaatatattctccggtccgctgaattgcacccagtgacggtttcatcaaactcgcttcactactacctcttgaatgatgagggcgcttttgctatcctatgttgtgctgactatctatagatgtacaacctctcctgaaatccatcataacatctctagcatccgctgcgaaagtcggcgagccgacggggggaacaagaaatggagtcatgacgtcagctctccgttgaagactcagaggataactatgagggctcccgtaggagggatgataaacttcctttttcagttttcttatatcttcttttatcgaaaaaaaagattgtcgattttcttcttttttcttaattgtagccaattttcaaccggttagttgatatgaggggatactagaaacgagccgtaactacagtacaatagttcatttgttgtctattcaagggatgtagtagtcacctgatcaatcgaaggccactccaacaaagtgaccactacatcctaatcatcactccatgtcccatgtattcaacgaaatgcctgctatacttttcaggtatgctgccgactccgtctgcgtcgattatctatttccaaagtgaaggcaacagtgttagtgtagcgacgtcgacttcaacggcgaagcaagtagacaaagtggtagggacctcggctaggtatatatgtaatttgggaaccgaaaatcttcttttatcttattaggggtagtcaatgtccgtcacttttttccgccgcagcaagtcggatttttttccggggctgtgattggtcagaaaaaatctgcgatcggaacgttctggtcgagccgcagcagcagctcgtttttttttgctggcatggctaagatctgagcaccaacggtacggcagcatgatcattgcgcgacggatagactccgcacttgggggctgtgccgcgagcagaattcttgtaaggtcgatctaggaagtctacatgtgtcagtcgacgacttggcgtgcaagcgtttctccagcaccatcatgtaatgcacgttgtatgccgagtgacggagataagaagagcacttccacgctcttactgaagctctagatctacactactcaagtcttccctagcagctcagggctgtatcaaaagctgcgtccgccgatggctgtgtgttagaaggcgctgagagtagtgagcagacggcagttagctaaggtaacaacagctaacttagctctactttcgcatcagcagcctgagcaacaagcgcctccccccaacaaaactccccacgttcagcctccacaccttgatcatcaacaacaggtgggagggcgcgttcagcaacctctacaacccggacagacgctgactggagtttcctgctgagatcagcacttaccacgtcgactgcagcaggatggacacgccgctgccttctcacactcaacttgaaggaggtagagggcatcgccttcctctagctggcgctccaggcgttccagcgcacgctttccccgcatcccagaggacaagcacgtgggctggacgtttgatgccgaggggtgactgaaaatctagatctgttgctgcagaccgagaatggggtggtcaacgcactcagcttgtgattggccaaaaacatttggcgcgttcgagcaagaaaaaaaaatagttgctgctgcagacattgactacccctattatattcttgagaaaaaaacctcatttttgatcatcttttttttgacatcccggttccgtgctgaatcgatgcgttgtatcgctgtggttctgaagcgcgatttcgatctgccgtacgtgtggtggtcagtatataatgacagagcaccgcctgcagtgtaaaagcaaatgtgtactatctggaaagcattcacttgtgggtaaatgaacatggtcgcagacatggtgttatgctctgtgatgtcgacgtactatttcagtcatgaagttgttcttcgctgagtgagacgaaatcggaattcctccgcgcctcattctggtgaataggaagcgacacagaacatcggctgcaggctcgacccgtgcactaccgactctaaagtaaattcgcaatgtgttcaaacgcattcgactcgatcaaggcagtaaaattcgaggggttcaattcaacagctagagcgtcttcgctgttatcaaagtgtgatgagcttcagtacagccgttttgtttggagccaagctggatggagaaggatacgactacgtcggtatcgggccagatgaagactcatttatccttggcatttcgcccttgtctacgatcgatgcctgcttgcgcttttcaaagaactgcgcgtattgccaatttcacgccgatgctactttcaaggttaatgacactgggtatcccgtaatcacgtgcgggtttacagacaaggcgagggcgtaccaagtgggagcattctttgtcgtaagtcgaaggacagtgcacgaatacaccgagtgctttcgaggctttgtgggcttcgtacttgatcaccgaggcgctaccccacaagtcagcgtcgttatgggggatgcagaagatccgcagtatagcgctttcgggtcgttaccaaccttttccggtgctaagatgctaatgtgcttcttccacgttttaaagaatatgcgaaaaggagttcagcatcttccaatcaaggacaggatgcaagtcatgacgtcgattgttgagatgcttcatggaagcgtatgagaccattcgagatcaggagcttggaaaatgacccagctctcctcgtttgctgaccatttcgacgcacaatggctcaaaggtcaatactcacaatgacaatcgttccccacaccacattttgcttgctcaaacaatccctaagaaagcctgaacggacctttgaaatcacttctccaaagacgtcgccaccacatgcgccgactactcttagaactctgcgaattcatcgagactataagcccgttgatcccagtaaagtctgactacaaggcgatgtctacgagtggtgtggccaaggctgcagctgaaatgcttgaagccggtcatgtgcaaattgaaacgacctccgaagcggctcgtgtcagggttttagtaatctcgtaccggataccgcatacgaagaggatgcggaggacgaacactaatttcgtgtggtattcgatgacgagacaccctcccgtagcccccagtcatcacaaccttcggcaaattcgacagcgcagagtatgtgtttgagattaatttctggtggggacactgatgctgaaggtgatcaggccggtggagacgctaaacctggtggagatcccgtcgatttacctgaggaagaagattcactcataggaaatgaaagtgagctcaaggatgaggcagaaaagaagcggcttgcaggcaaaggatctatacgacatggctaccaagtggtcgctacgccatcatcctagaggctgttaggtggatctcggcggcaaggcgtgtggatgcaggtattatgaaaaatatctcgtttgtgctcacttagttgctgcgcagcgcaagtacagtctcatagtgtcaaccaatgccccgctcgaaaagctgataaaagggattaaagcgaccactaaaggaagttgtgcaaaggcgcctaagccgcagacgagtcagcagaagcccaaagcgaaaaaccaaacaggatcttgacgtccaaagatcatccgacctaccgagcaagatacccaggtaggtgttcccacaggtagacctacagtagtagcctcgattcactagataaatcgcacaagctcttgaattctatacgccgctgccttgaacagcacatcccttttgttgccggcgtgccgatgcctgctccagcttcatgcggtgtgaattctcggatcgcgcacaaatcctggtgttaacgagtaccgccgcaccgacggctctatcagtattgttgtttcctggactggcattgagagcggtcccgaggagcgagccacctgagcgatgccgggagctgcaggaagaccccagtgccaggtgcgcctcgtccattgtgggcttggcgaggcttcaagtgctttcaatgaagctgtgaaagattcattcacagtaaatttttatggtatacattcacctagtcatggacgctgcggagtttagaaacgtttagagtttgtttgcaaactcacctgagttttaaggttggcaaagtttcagaggtttagacccctaaacgttgacacctctagtaaggggtaagccgaaatttatgtacttcttcatcatagctatgagtcaattttgcgttacaaagttacacacaggtttatgagatgctgatcaaaccctgacacaaataaaaacatgaattagacttatgcgtttcacaaagaggttatgagcttcgagaagtctgcgatagcagcacttacgtcgcttcctatttcagtaaaacatccgtttcacagcaatctaggacccatcagaccaaatcggattatattcgcggtacatcaagtcaaaagatggtttctcttgacatctatctggcaataaattttcttgaaatcggcatgactctgggggcacactgggtcctccaaaaggtttatatgcgtgggtagtttgaaccattatgagtcagtaacatatatcgaaccgggtacgagtcgattgagtcaagtaaacggaatagttgaagcggacgaacaactgtagtagattacagtggcacgcatttttcattttctacaagctacaaacatatctcgatcaagcttctttccattgctaaatgcgctgccaagtcatatctacacttttaaggcgaattgctgcaaagcacgcgcaggaaatgaatgtgtttagtatgatcattcaccaataaaaacggagttgtattgtgaaaaccgattagaatgtcttattgggttgttaatctgccgatttagtggcttaatgaggccgacgaccccctatttgatacttagtaaatccgacctccgaattagactggggtacctcgatttgtactcaagattactacctaggacgacttaaacactcagagcatatgagtaggatttacatttgctaatcggccgattaagccagaaccggccgatttgcttgctgttcagacggaacgtccgatgtgcaaccggcaatcgctccttgtaggctaaatcagccgccagacaacaatggttgcagtcgctcttggctaggtagtcaaggatacaacaacaacatcagaactaagcaggaaaagctgcacgctataatacatgtaactgagataggcaagcgacgcgtttaagcgtggtgttgtcgctgcacttggcgagtctcgggccgagggtacatgcatgttgatccaaattgctaggctgcacataattacgagaccgatgaacgatttatactccgattataattgagacatccccgatttattagtcttcaaatccgctatgagcgatgtttagccggctaattcagcaggacaaactaatcggttttcacaatacctaaaatccttctaccccttgttttcgaaattagtgaaataattacgaaagatgcataacataactttagccaccgtgaaatttatactacgaaaaaagaatcaaatcctttgttgatgtggcacacacaggtcgttttatcctagcgacggcgcctaaggataaaaatgactgggcgtttgtaaagaaagcttatctgtcgtgtcgcgcgactcttgggaacataagatgctagaggtattcagggcgatactccagtcaagtcgaaatgcgatttttatcctagcggataggataaatctggctttttgaaggaatagcttcaggtactcgtatcttttttgtcggcagttgtttcaataaagagagctatactttttatcctttcttttaccctacgcgtcactagggttaggggtaaatgggtcacgcctaaacacctctattggtttgtttgggttgatattcctcccgaaaagggccttcccacgggtgttggagtagttttgtagggctatgtattaccagtggtttatccgatcgatatgtgctgcattgggctatgcgtcgtgggcttggaagtatggctggcacattggacatgtagatcacttgggttttgagtaggagcagttccctgttggggtggcgctctggtggccgcgaaggccaggaatataatcactctgggtggcttgccacccgccgctgtcccgcagctcctccacggttggtactggcgacatgggagatccaaatattggcgctcgattggatgcacgttagggagttcgaccggtccaggcgcttggcatcactcttagatagaccgagtgcttccgtgaaggttttgaaattgctggggtgaactgaccccagtgagccgtaaacaattgcagcggtggtggttcgccaaccacgttggcggaggttgcgggcgagaggttcataggtcgatagtttaatactccgcgcttgggccatgcttgatgttgagcaggatactgcttgaccgtcaaaagcgacggcaaggtcgcaaatgacaacagttttcataactgtatcgataatctgaatgtcaggccgccgagtagaatctggaatttgttccacagtttggttaatccggatacgaatgttcgggttgtcgaccggtttgtgggctgcttgcaatttgttgccaatcgctgcgagcaccttgtcgtggcgggcacgaatattctcgttgttaccgtcacaatggttgagaatgtgtgctagggtttcattttgctgtgtgcagccagcttgtcgacagcgtaaagcactacctcgcttttggcgtttgagcactgagcgagtcggcaactggttgagacgacccgccaacacaaagcgatattcacgatcctgtaaactagccggtctcccaataaacgagctgcccgcgtgtccatggtttcttgcagtcttgccctggtcgctctgtttcatccattcctccgcaaactggagcttagcatgcagtttcagctgcgcgatgacatttcttcgatcaagattgtttttatgcttcggagtagttaggcctaaagcagtcggggcttggtcatcatcgtcatttgcatcgggtagcgtaggatccatttcactgtcgatcgcatcgggctggggctccggctgatctggccgcgggggcaacatgaaacttagacccagtcgtcggaggtgagctcgaacttccacccacagcgagcatacatcgtgtgattgtctttttttgactgcatgaggtgagttctcgagattgccattgaggaacataccaatcagaagctcgtcttggtctttccaatagtccggcgttaagcgatagcgcttctggataatctccaccacctgcgcacgagctatatctcgaacgtggatgtccttcgagtgtagcatttgaaaagcgtgtccaatgtgcgtagttgctgcgagttccgtgagtggcagtagccctaatccgcctttcgaagttggggcgtagaagaaagctttggacgcacagcgtggaagccgtagtaaatgtcggagctccctgcgaatggccgcatcagagcgttcaagttgcgtgtgattgacacgcacatgcctcaaagcgaaatccagcttagaatacacgtagaccttgatagccttgagagcttgcgctggatggagtccagaatgtagtagggcgtgtgcgtcctggcgtaggtcgcggagcttgctgtccatttggaagtctgtgaccgagtgatcaaaaccatcctcaatgccgaggtagcggtatgtttgattcatagttagtgtcggtattagctctccatcaagatgcagcttcagaggatcgagcgatcgacgcctgttctccatcttcgtaccgaacgcagcgcacttcgctgggttggccgtcatggtggaccaccgtaggaaacgcttcaccttgtcatgggcttcttggataccttctcgggtagcgctgtaggttttcacgtcgtcagcgaatgctgtgacgtttattggcaattgcgcaccaagtttgacgccaacatgtgagagtgtcgtcaggcatctaatcagcggctccattccgatcaggaacaggaaggggctcaggggggcagccctggtatacccccatgcggtggaggatcaacggtgtcgaacccgtcgcagtattgaggaccacatagtgtgacatagcgtagataccctggcagcactcaatgtagtcatcaggaatccctatcagcttcatcactttccagatcaagtcgggtggcatcgcaccgaatgcgtttgccacatcgtaccataccatgtagagtgcttttccttggcggcgagcgtggtcaagtgccattgcactgacaaagttatgctcattgcacccgttcacatggcgaaaccctttctgtgctgtcgtaaggcgttcgttgagttccagccaagacagcagtcgctcagcaagaacactcgcgtataacttgtagagtgttggttgcaaacaaatcgggcgccaattggacgggttcatcttcgagcccttcttgtagattagattgacacctcctactctccaagtgccgggcagtcgcttgtacttccaacagaaacaataggcgtggtgcaagagcgggagtagctcgtctcggtacttgtacaggatgtcgtatcctatgccgtcaagaccttggagttgctcttctacctcgtggccgctacaagcacagtgtgtgcgagctggccagctgcgcgctgggccacatcagattggtggttctcctcgtcgattacgtgcaagatctccgccaaatcctcgtcgccgagagccgagaagaagtcgtcttcgtcgtcgtcctggatgccgagccgtaacggaggcatgtctctctcaagatagtgtatgcgtgtgtagagaagctggcttcgtacccccgcaagaggggagataaaacagaaattggagccggccagtggccttcccacgggtgttggagtagttttcaactagcaatcacgatgcatcagcaaagcttcacacactatcgtattgccccaagcacaaagataactcaactattcatttactgccatctttatacataaatactcgccgtacgtacagctgtcagtttcgtgggttggacctccggaatgttaagtggcaatagcttgtttggtggttcatgcaattctgtggcgaaactaaccaatcagcagagggaatcgcccaactccggagagccgcacaccttgccatcccacgccgctaaagccaggaacgacgatggacggacccgctggaagcgagaagatcatgtacacgacggtgcgtcctgcccccgccctctcgtccggcactccacggagcatgtccgtcctctctctgaccttaatttacttgtttgctgcgtgtgtacaggccgcgggcgccttcttcggcgccgccatcggctccgtcgagtccgtctgggccatccccaagcttggtgcgtcgccctcagctcgctcttggtgctcttacggtacaggacactcacctctatgctgctgtatatttttccgttgcgtataggcgacaagctgcccaagctgtcgaaccagctcaagcacctcggcacgcgctcggtacgataattacagcgttgaggcccttagacaaggttgatgccgttgctgacctcttactcttacacatttttatggctacagctcgtgttcgctgccgtcggcgccatcttcacgacgggcgagtacgtgacggcgtcgattcgtcagaaggaggacccgatcagtgctggtgtcggtggcgctctggtgggcgtggtgcccggcatggtgaagcagagcatgcgtgtgggtgttgcctcgggtgtcgctgctggcgccgccatggcggctgcatcgtactggtacgtttatcatccagtgtgtgtatgggttcgattatattctgacatcgtgcgttgtattgttctgcgcaggcaatcttcccaggactcggctttcgacaagtacgccgctgcgcgtcacgccgaccgctcttaagctcgcggcggctcagtagctattggccatcgcgacgaaatgaaagaaatgaaggacacctcgagtttgggcagctatcctgattacacgcagagctgacaacagcattctgcagtgttcacttccgccgtttagaaggatacgtgacgcagtgcacagctacctcggtggtgggatataaatgagcaaacacgaacgagaacagtgcatgcgcgtacagctcctggcgccacgttgttacacagtgctggctggatgaagtcttcatgggccatcgtgcacgggttgtgtacttgtagtagtagtacagctcggaagggcttcgatgcaaatggtgtagctatctgcaatgatagctttttgctttcaaaaccagcgatggtgcgagcaagggcacttgcttgatgccacctctacaacaacctcggtacagcactatgttcatgttcatgctcctattactgcaagtctagtggaaccattgcaactgcgcacagatctcttatctggtgttcgcactaactacgaggacatgcatttgattgtgtgagtttagtatggagaggatcgtgaaaaccccttcttcaccgggttatccgaagggatccctcgacccccattctcaatatgggctcgccgtgcccagaccaagttgccaccgaaagtgcaacgaggccgtatggttgagcaagcaagccggcggtaacaacacgcaaatgtttgtactatacaatagctcttcctccttgttcactccaacgttggcccttgcgtaatgaactcgcaaaatggtgctgctagacgcgcgtggtccacgattggccagggaactacggttcaacggttagcatagcgcggcgctgattggctgagcggatcctgaaccggtctccggacatttcaagcacaagttgccttttacgcgagcggcgacagactggcgcagttggagccatagaacccgggaaagcacgagcacacgccgctcgagtagtcgcagatacctcggttagcacagtcgacgtggcacagatttcctgctgcgcctgggccgacgcctcctgcagcaacgacgccctcgcagtctgtttcgtcctctgctgtcatcggatcgtctccggaggggcagtgcactgcaaggcaagtgagaagcatcagcaagagagcacgtaagcctaggaaagaagataagaactacacattgtgccacgtactcctagagcagtcaggtccaaaccactgcgagagctgcgactcgcctgcgccgagaccgacgggccagtaggagtcgcaaaggcagccttggatgcggtcttggtcccaagtcgtcgcagtcacgtccccgccgtatgtcgtcgctggcgacaaggggaacgcactggtctccgtcgcgagttcacgcatgctgaggcactggccgtggccggagcagccattggggcaactacctgcatcgcaaacagcgtcagctatttgcctatggcgcacttcctgcaacagccagccaacgtactgcgctggcaggccgatccttcgtatccgtagtagcacatgcacgtgcccgtggagcggtcgcagacgccagcgtcggagcactccgccttggcatgggacgtcgtggcgctggtcgggatgccgccccacgacgggcctgccgggcaagttcctgcagcaccagccaaacaacacttacgggtaagaatgccagccaacatcagtgcaataccgggcgatgcattgaggctccacacacgcagcgagcagtccggggagcggtagttggtgatgtccgtggaagcgccgtagccctcgttgcactcgcaggtcttggtcagcgcgtcgcagcggccgtgcgcgttgcaattgctcagcgccgcgcagagattgcccgtcggcacgcccagctgcgctcgtgccagtggcgtccaggtaatagcagtggcggcggcgatgcacgccagcgtcacgagccggatggtcatcaccgtctttggtcggatccggtttggatcgaccagatggctacagtcccctaaaaataagaccgcgacccttgaagccactctcgcatctggcaacgccactggccttgtttcacctcgctttagcgagcatctcggtatcgtcatcgggttgtaccctttcctatgtgtcctccacattacacttcaagtcgttaaatccaggttcaatgcgttgcccaatggcaggcgcgaaaaaagatcactgttcgttacaccggcaaaaggaaacaaccgcactctgcgcggtagagagcgagccggtgaggaagaagaagccaacgcgcctgcagcccaagaagagagagcgcgcgctcgatagcctcgtagatagagacattacgtgcaggcgaaccctatccggtcccgtgtctgcgtctgcgtctgcgtcttggcgtgcagctaccgtagctcattgtggaaatctctgtctgccatggccgagtgcgagcggccgccgacgcccaagagcaagagcccgcggcgcgcgccgccgccggtcatcgagatcccgctgcagagcaacatgagcgcggaggagacgccgtcgctgccctcgtcccccacggacgccgacacgctcgtggggctgccgttcgtaacgcccagctgctcgctggcgctgcagtccaagcgcgtgtggcacgtgcgcaacgcgctggtcgcgtccaggctggcctcgtgcagcctcgacacgctcgcggccgccatcgaccagcgcgcggccgcggaccgcgcgtcgcccctcgagaaggacgagttcgtggagctcgtgcgcgcgctgccggagctgcgcacgggcgagacgttcaagcccatggaggagacgctggagcgcatcttccgctcctttgaagccaccaaccgcaccgatatctaccagctggctatgggctgcctcgtgctgctgcccggggaggtcaaacgcaaggtggagatcgccatccagttcagtctcagcggctgcggcgtggatgtcggcggcccggccacgctgtccatcgtacgcacggcgctgggctgcttgttgctctcagtgtccgcggtgttcgacctggagacggccacggcggaccagctgcagtccacggcgtccattgtgaccacgtgcgtggatgagacggtcgcgcgcatgttcgcggccaattcgttggggaaggacgacacagcgtcgttcgaagagcacatttggccctggatagaggcgaacagcagctctagcaaggctgtcccatggattaagttgctggaccagaagaagtggccgggatccaagaagctgaccccgagatcgcctcaaagctcgcctacgaagtggggcctaccggaggaccctcctccgactaccagtgaagctggagacgacgatggcgagtatgatgacgatgatgacgatgcaacggcggaactgagcttccgtttctccagtgtagacggcggcgtgttgaccatcggcgagcagcaagcggtcgatttgtacgacctgttggtgcagtctgcgttcacgcgcgtaactccgcaagccatgtacgatacttttgtacagcacactggggacggtctgctagaggaagaaacgttcttggaggcgattgaggagctgctcagcatgacggacaagccccacttgatggagaacaacgcgtttctggagagtatgctgtcgatcttccgctccttcttgcccgagaagtgccctaccgtggatgcgttcgagatcgccgctggcttcagtctgatgtcgtggggatcgaagagcgacaagctcgcgtctgccttccactactttgacgcagactgcaaaggatatctgaatcgccagcagttgtggcggttcttgaggtctgttctaatcacgctactgtatttatcacctcctacagacgctttcttgcatcgatatggctcgttggcggagctggttgacaagggagaagaagagatcctagaagccattatggagggtcttcccgacgatgaaggcgaggaagatgatgaagaagacggagatgatgccagtgatggtgacgccaagcaggagaagagtgctgctggtagcgatgacagtggagagtacgtcgacgaaattgatggggatcgcgcgcgagcaaactccgacatgcgcttaggcctctatacgtttgaagatttcggattgtggtacaatggcggaggcttcaagggcatgagctggttggagctattggatcttcgcaagtgggtatttgtatcgccttctttcagcttggagggtcttgacacgcgatcggtggacccaatcgtggcaagcaacaactactatactgccaataacattcaagttgatattgatgcggtagacccgccggacggagtcccaggggttaagaagccatatttcacgttcgctgacgtgattgatgaggaggaggacgaagatgaagacgaccgtggctcggctagacagcacaatccccctcctccttcgtcgtcatcaatcgagtcatcctctacagctgtgcgatcatacaacagcagtatcccggctacgctgcctgcgatctgcttgaagaatgaaattgtgctagagtttgatctcccattcgacgccgatgacgatgcgatcacggaactacctttgacgaccctttgcttcgacaatggcgacttaatccagtactttgagctccagcgtgtgatcaagctcaaccaagttcagctgtatcgcgtgtacgacgtgttcgagccgttcatggaagatccgtcggcatcttgtatcgagaagagtacgtttgataagtgcgtcggaaagctcctccctgccaacgtagcccccagtgtggcagcagcctttggtgctaacagcaacactcgggtcgcgccccgaagtgtagggcgtggaaaggacccgaaaatggtggcagacaccctcagccgcctgttcttcgcgtttaatcgcggtggtacggggaagattgatctggttgagttcgtgtcggcgtttaccatcttctgtgccggctcaaagagtgagaagctcgcgtttgcttaccgtttgttcgacgctgatggagatggctgtcttacacgccgggagatgtggaagtatctgcggtctttcttgacaatgctactggctttgggaaatggttccgaactatctgctgaagctatcgccagcgtcgcggatactacggcgattgaaattgcagattacatcttcaaagacacggacaagaccttcagcacaagacagtcaatactatccgcgcaagagggaagtcaacgacacagcttagatatccccatgtcggcggacacggcttcgttcaagagctcctcgcggcatcaccgaggtcaggggcgctacgagcaccgcggatcttttcccgaagacagcaacctccatctcgtgggagcagcgtccaatgctgcaggtgctggtgcgggtagtgcattcattcgtggcggcgttgtatccttcgaggagttcgccgtttggtactcacagcatggatacacgattattgcctggattgagttattggacaccaagaaatggccggaggtgagccgttcagtggccgatgccattcttcgctacaacagtcgtcagcagcacgcgcttgagaatgctacacaaatgggatccgacgatactggatctgggtcatccaacgacaccgtttcctcgaacgagagcactaatcgcgttcacgcatcattgcaaccgaactacccggagtccaacatgacggtactcgacactaccgccttccagactgcgaaccgctacgcagtggaagcaggcatggatgctgtgaccggcatcgccaacctcataacatccccaacggcgtcggctgctgctgcgaaggacctctcgtcggtggctttgcagttcaagctaacgagctatgacaacaccaccctccgaattcgtttgaaggacgtcgctatcgtgtacaccatctccgagcgcatgaacttcagtcgcatgtcgtgtggtgagctggtacatctgctcaagaaacacgcgcacaaccgctgcctgacaaagccaggatatttacgagctatgcgtgaccttgtcccccgcgacgaactgtcgaacgaagaccaagagtttttatcgttccacttgctgcggattttcaccctcttcgaaagcgagagtgtcctccaaggtaatgaggccaacgacaacggaagtgtggaagacggcgacgaccagaatggcagatttgccaacggcgttgggatgaacaccatatcggtggaaacgttacagttggtcgctggtatgtgtgtgttttgcggaacgaccaaaagcgccaagctcagcgtgttgtttaagctctttgcttcgcatggagacggccacgtttctcggcggcgtctatttgagatgctgaaatctatcctggtagtgttgttcgctttctcaagctacaacgctacgagaggcaactccaacgacacgagttcagtcagttcctggagtacaaactcaatcgcagagcgtgccgcgggtgctgttgtctccaagctgttttgtgaggccacctgcaaacgccccgatgcgatcagcctggcggagtttgctgcgtggtatgcggctgggggctatatggattgcccgtggctggagctgcttgatttgtcgaagtggccagccaaggaggcctttgaggctagcaagcgtgagaagccgctgatctacgcgttcgacatgcttgaagaaggcagtatcttacactttactgagagcgacatatcgacgtatctattcatgctgcgctcgacgaagctgggcgagctgggtgtaagcaaagtgtatgatgcgctgcttgcgtatgcaactccatcggcggaggaggcgctcaagatgtcaaaggcagttggtactcagagccgccgaggtcagatgtactcgtatgcagctgtggaagaagacgaaggagcgtacttggtccttacacgccccaacttctacgagtgcgttcgcagtctggtatcaaaagacggaatgtcggagaaagcgcagcagacttcgtccaagttgctctcacgactctttaatgtattcgaccggaagcgttgcggccgcgtgaatgccttggaactagcttgtggcctgagcattttgggcagaggttccaaaagccagaagctatcgttggcgttcgacttcatcaccaagatgcggcagcaacggcacaaaacactagcaagctacgcacctcctcctccaagtactgctgctggttttggcggctttggggggcttggaggacaaggaacggcaacgggtggttttggctttggaattgggggcattccaagcaaccagttctcgatgagtggggctggtgggtttggattccctagcactcgcggattgggatcaactgcgcagggtatgcgtggcggaatgagtcgccagcctccaccgctctcggttgccgaagtgaatgctcttccgcactcagtacttttcatctatctgcggtcgttcttactggcgcttatggcgctcagcgacggcacgtaccgcctcggtctagagaagatttacgtggaggccgacgacttcatcgaggaggctatgggcgacctcatgacggacgtgacggctaacgggggtgccaacgcatctgcagccaccgcgctttctgggtacggcagtgctcgctcgcgcgcccgcgtgacatttgaacagtttggagaatggtacaatactggcggctaccagcttatctcatgggtggagctccttgacgtgagcaagtggcaacagcagcaagacttccaagaacagtccatgtcaacagcgggtcccgcttcaactcaccagagcaagcgtatggcgcccgttatgggctcgcagagtcgcggtcccatgtctaccgcagctccgatgccagtggagcccatgcagcctattcaacgatcaacaaagcccgttactcgtcggcggcaggtgcggcagagcgacattgtatcaacgccgtttgtccgtggcttgcctggcgatcgctcggactcgaagcctgatcctcgcgagtcagcgggggcaatcagtttgagctccgacggtcccgtcatggtgttcgctgttgccaaggaggccgccgagctgcagttcttcaacgaagatatctcgaccctcaagctattcttgcggcagacgcaactccatactgtcacgtcatgggagttgcaaggagctcttctggaggcactggatttcccgaccgccaacagcaacggcatcatgctgacgaggcgaaacatgctcatccgtgggctgcagcaagtgtgcggaactttgcctctcatcgcaccgtcaagtggatctagcggccagacgggattcctaagcgaagagggcaccgatatgctgcatcgtttgcttggagtattcgtgcatgagcccgcttctgacgacgaaggcgagcagctagcaactgatggcgacgatgatgatgaatctgaagaccccatcgacatcggggcagcgatctgcggcttgctggtggtatgtgagggctcgatgctggagaagctcaagtgctgcgctgcactgatctccgatgatgacagagagagcacgctcaagggcgagggcgaaggagagagggagagcgacgtcccgatgatcaagctggagacaatcaagtcgagcctcatgtgctttctgatggcgttctacggtatgagcagctcgttgagcgccgaggtggcgcgatactccgccgagctgggcgccgacgccgtcctgcagtcgttccttgattcgacgatggaaggcgaagacgttaccgctgacgatatggacctcgagaagcaggtctcgctgcgcgagttcagcgactggttcggcgaggccggctacccgactcacccgtggctcgagctggccgagctcaaccactggcctgccgccatcaatgtgtgcggcagcaatgggatcaccgactcgggcgacgagcgagactaaaggcaagtgccgttgcaagtagtaagtagatagaacattatcccaatacatgtattttaatacatgtattgggataacgtcgtttctacatgtagtcttacgtgtagataagcgcgcaagccttggagcataagaaggtgttgttggcgtttgacaagatcgagtacatcaattgccagctacggtaggcaagtagcatgaatttatcgcgtggctattgagcaaaacttgtggtattaagttgtctctgtcatctcgcagccaaacagcaacaaagagccaagctggccgtggtccacgcaacaagcgattggcaaagccgccattgaagactctacctgacgcgttggtgccgcggaatcaggatgaacaagacgcggggcccgagaaagattcaacgcctgtgaaggtgtcaactcgaatgttgcggtcacgataccctcgattcttcgaggctgttgtgccgacggagacaccgaagagcttgctcccaagacaacgcggcatcaattggctgctccgtacgatcgaagtgatttacaacgcttgcggacatcctgttactgaagatggggtcggaaaaggtcgagagtctcgaatcccagctaatggtggatgaacctacgagtgaagaacagcatggccagccatcatacggctctgtggcgtagctttcggctttgccgttcttcactcgtaggttcatccgccattcgctgggattgccagagctcgccgatcaagagtgcatggatctcatgtataacatcgaactcaaccgcgatggtggcattattcgcttcgttctaaagaatacgataaaatcaggtacttgtcaacatgttactcctccttggtcttcttgtcttctgccttgtctccgtgcaggaggaaggcgagtcccaccatgatgacagccgcccccacgaaccaccgagcgggcagcagctcctggaagaagaagaagccgccagcggccgacagcacgcagctcacggcggcgctcgtgacggtggccgtgagcgagtccgtctcgtgcagccccttgacgaagaagttgatcatgagcgcgttgacgcccagcatcagcgctaggcacagcagccgcacgacggacgccaggaatccgcacgactcggacagactcgaggccgcgcactgcacctcgagcagctgcagcgcgctcgagtcgccgtccgcgcccaatttgcccagcaggccggcgacggcgccgagcgagccggataatgcactggtggagaggagagcagagggggttagagcgaggtggaggaggacaaggagctaaggcatctatctacctgaatcgcattcttgtgaagtggaggtgtcgtgtgcaaggtgcagtactgtattctgcgttgtgaacgacgcagcatcggataacctctggtactacatacgtgctgtgagcattttagttcctacaattccttggacattacattcacttcaaaaccaagttagatacagtgtgaatgctattgagggtaggaactgtagttgtaacaacacttaacacaaatgctgcttttgctgctgttttgctgctcgagaagggtgcatgctcgcgcctgctagatgctgtatgaccctgtagcatacgaagcctgatcgacggagtgggggtttcgggtgttgccggtcatggagccattcactttaagtgcacaagcacggctcggcagactccaccaacatcctcgacgtgggttcgaaaaggcaacctgaagctgcatgttcaagcactccgcaccgctatttctgagtgatgaactcacggtcttatcaccgacctccgtctatggtgcccgcctatatttgcacgtgctcacgccgcgcgctcacgccgctcataccccgccactttccaccttgcattacgtcgctcgacacctcccatccaccgctcgccgacctgtatattaatctgcttcatcttcacttgccatgagcaccatcagacgctttcggaatatctacgcgggtcccaagacccgcaagcgcacgaacgccgcgttcgccggtatctgtcgctccaaggcgccgcctcgccgttcggccaccaccatgctctggggcgcgtccactgcagcgcagatgcaccagcctgccaagtcgaaagccccgtcatccaaagtccccgctcgaagtaagccgaagcagccgaaaagcaccgtcgatgcgttagtggagcggttccagtcgttgtcgaaagcgcagcgctacaacgtcatcacgcgcgtggccagcaactacacgaacgaactcgaaaaggtgctcaagacggccgacacggaccaggacgggctcctgagccacgaccagctgcgcgggctgctcacgtcccgcttccgcctccgtccagtcgccagcacgaatcccgcggcctcgctatcgtcccgcgcgcttgctccgcccactcgtcgccagctcaagctcgtgatgttcggctcggccatcccattcgtggggttcggcctggtggacaatctgatcctgttggtggcgggggacgccatcgagacgcactttcactcgtcctacgccatgtcgatgctatgtgccgctgcgctgggcaataccgtggccgacgtggtggggctcagtctgggcggcgtcgtggagtccatggcccggcgtctgggcatccccgatcccatgctctccaaggcgcaagccaacatgtccatcacgcactggtgcaacttcttcgcctccgccgggggcatcacaatcggctgtttgatcggcatgatcccgctgctctggatgaaccacgacgcgtacgaggaagagcagaccagcgagcccgtcaagaggaagaaagctgatactgacgctgctgagtccgcaactgcaacggccaagtagaatgctgctccacagtagaatagacccccgtggtcctgtataccaccgctgaatcactttcgcgccgatcaatcgccttcatctccaccactttgtccgttaaacgcgagagatacgcgttgcctgcctcccatattcgtgtccttccagccgcttacacttggagtttgtatgtgcccaccatgccaattgttttacgtggggctcgtatctttgccgcgtgacccggcaccatgcaaaatggccgttacgtccgtggactgccgcgtcccacgcgcatttgacacgcaaagctgaatttgacacgcaaagctgtaacagaagcaccgcgtcaagtgatccgcgccatgtcaccgcggaggctcgagttcgctattttaacactacacgtacggactcgagccaacgccgtcgcgtcctgggccccacgttgcgctcgggccggcctcaatacaggcccttgcgtttcaaggaccggcccaaaattctgaggacgacagcgcgtcgcacatagctggggggaggaggcctccagccactcacgttcgcgcattcgctctcgccgacatatgtgatctcccagagggatttcacttggtttgtgcgttcctgaatataagaaggtacaggtcatcgaatcgaacaacgctgacgtcagcaggtttgccgccagagtctccgctgcgctgtgcacttgctcgccccgctcgcttcattccgcattttgcgtcgcaagccccaccaagcccaagaccttccaccctcctccctccccaactcaagacaatggctggccgtgttgctcagagcactaccaagagatggctcggtgacaagggcacgtggcccgtgctcgtgacctgcgcggccgccgctggcctgtgcacggcccagtgcgtgcgctacctggccggccacccggacgtcaactggaacaagcagaaccgccaggacatgttccgctacaaggaggacgtgggcgccgactggcagtcgcaccgccgcaaaatcgccgtcatccacaagaacgtcatcaacgaggccaagggcctgaacaactaagtctccggatgccgggctggagaccgcacgccgtccgactgactctgcgtaccgaccggtgcatcagatcactctacctgactgcctgactgacgactcgagggcaaaggaacgacaacgcggaatcacaagctgaagccttcagtgctgtacttttacattacagccctctcccgacgttgcctttaagctgacggagggggttagagcgaaatgaaaacacttattttggttctaccttttactcgcagtggttgttctaccttttggtcgtcgttgcggttaactcacacattattgttaagcatgttgcatacgtacaagtttaatcagcatcatctccctttaaagctacacgacgcacttcaagcaaccgtcctccgtgccgagtagcacaagttggcgcagaggcagcaccgcgatgctgtgcgagacgacgcggctcttgttgttcttgctgggtcctccaggctccgtgagctgccacgactccatccgcgcagtgacggcgggctgcaccgacacgacggcgcgcggctccgttgggagctgcacgcagtggatgcgagcgccgttggcgacgtagaacacggtcttgtccgtggccgagtggaccgagatctgcgacgcgcagatgccttctggtacacccgtgatggtcatccggagctgcgggtggccgtgactgcgcagcatcacgcgccacacgcgcgcctccttgtcggcgcccaccaccagcaactgcgtcgaagagatctgcaccagatggacgacgcgcgcgccgggctccagcgcttgccagcgagctgcctgccgaccagttcgagcgtccagcagtatcacgcgaccgcttgcagtccccactgcgagataccctgtgccatccacgaacgaagccactgctgccaagctcaccccggccgcagatgaactcgagccgatccctgcagcatctgcgtgccactcggctacaacgcgcggaccagtacgagcatccacacagacaacacgtctcccagtcgccacggccacatccacagcgtaagtccccgtagccatcgacacgacaggctcgttcgtcgcggagaacggtagacgcatccgcgcttgactcgtccgcagatcccagagcatcacgcctgaagccgaggctgccactgccagtccgcccgcgtctcctgctccaagtgcaccagtcttcattcgcgctccagctcgacctgtacgagccacggccaggatcgggcggttgtcggacgccccggtcggcgctgcagcccgcgcttgaaccgggtgacctgctagccgccacactcgacacgaaccgtggcggcttccagtcaagagcagctcctcattcgcgtccacactcacgcagcgcacagagctggagtgggccttgatggactgccggatttcggcgctaagagcccaagaacttcccagcatgccaccaccgcctcctccaccttcgtatccagccgcaccttcgtcccgtcgaggctcgaaaggttggcgaatgcgcgatcgaagccaaatagcgtcggctccagcgcgctcgggggcaaccgcggcgcttacgaccttgcgctgacggcgagtttcttgcaagatcaacagctccttgctgagcgcagcctcccactgcgccgccttcttaccagaaccaatgagcagcgtcgatggtacgcggaggaagcttgtggcacgaacggagtgcagacgaaccgcgtggtaggcgaagcgcaacagctcgggcggatacgtcgcgggatcttcgggctctgtcgtcgaagtcaccgatgcgttatcagtctcgtcattttcgtcatctgggtcatcatcatcgtcgtcctgtccacctgaactttctgcttcctggatcagtggcgtccgtttacgcaggtggatctgtgactgagccagtcggttgtccagagagctgaggttccgcttgtcgctcctcaccgcttggctgtcgaatccgccacctcggttgggatcgacgccggcgctactgctcagcggaagcagcaagagctggaggaccgaacttcctgcaacgatgggaaagtaacggttgaacagctccttccctagcagcgtacgtagcggcacacacagctcgctcaccagctcactggcgaggtcccactggaagttggacacctctagctcggcgtacacgtcgctgcaacgcttcaggaaccggttgatgccgttcacgaccgtggcatccgccactgtggcttctgctccgagcttctggcacactgctaagatcgtacgcgagagcccaaccaccgtaaatgcgcgtaagttgcggtgatctgcatccttcatgaagttcaggctccgcagcacctttttcttcgtcgagacagcagtagagccggtagcggttgcgcgaatcgaagaagctgactccatgcctgcagtggcggctgcaatcaccgcagttgccatgcgagggtgaaggaaaggtggcgctgcctgggctagcaactccatcaggctgctccgcgcgcggcgagatagcaggtcttgcagagaggctgtatcgttcagcgttcgtaccacatgccttaaaatgcgaagcagcacgtagatctcacgtcctagttcctcctgcagcgaattgcgatgattagttctgcaacaacaacaggttaagctatagaagtcaggagccacgtaccggaacgccttcaatgcggaccgacccgatcttctcggatagagaaataagccgcgggagcacgtcaaacaatcgcgggagtagcatgttggccacggggaactcgcccaactcacggcacacttgcagaatagcgtctgccacgtgatgcgactcgtacaacttggccttggacaagaaggtaagatgaaactcggaagttccaagaagatcgctgtcctcgatgatgacaggagccaagctgaccttcttgtcagtgcgccgcagtgtcttggaatctgcgaggtgtgtccagcgactcttaacgcgcccaagctggttcagtagcggtggcagcaagtacttagccgtgagcgatgggcccagcatcgccgagcatgccaactcaccgaaggtcacggcagtgagccccgcagactcgccagcaaacggaggcagcggtggtgagcgcacagacaacggcgttagcgacgatcttaattccgcgtcggagtcggtcgttggaggcaccaaccactccaaaatcacaggagcgaagctgtcgagaactgcagtcgccccaaacgcgcggagaagggaaagcagcacgcttggtgcccccaaacagcatctcaagagtagcgagcgtcccagctcactgctttcgtagacacgcacgacgtcaggcagcaactcaatacgagcccgttcacgcccaagctgtcgcgccatctcgggtagcaagaagacgacggccgctgtcacacgctcggcgcggatcgtctccgtgtgtgaacttgcgcggaagaacctcaacagctcaggcatcgcgacgcggaacaatagctccgataatccagataacgacgatagtagttgccttgctgcagtaaacctggcatgccaattacgctctggagcggtgtgaagcttcgtcaagaacttgtacacgactcccaggtctttcgggaacagtgccgagggagccgcgtggaacgcgtccaagggcctggtcgagggcacgcacgcctcactctttaaagagagcagcgagttgcccagaactgcagcaggctccaatccctcaatcctgcaggcgagaagcaggcgctcacgcgggtctggatgcagcatgtccagcacaccctgcttcaaattgagcggcaatcctgtgagtcgctctgccaccgcgtgattccaatgaagttgctgctgcgcaagttttgacttgcattgagcagccagaatactcgaaatccagccatctccttcctcatcgccaccgtcagccccctcagttacctcttgtttctgatgtcgcgtgtatgcagcaaggtagtcctccagagagcgtcgcgagaagactggcgtgtgcgtgtacagctcggcggcaatacagcccattgaaaagatatcagcagcttgtgccagctcaaatggcgtgagctcttgggccgtgcctgtagactccaggaactcctccaggatgcggtatattggatccaccacctcatccgcaaacgcgtgttgatcattgagccttgacacctccacaccaggtacagtcggtgcatgggcttcaggctccactgtgtgctccttttcagcctccgggagaacaattcgcagtccaagctggagcagcttcaggtcgacgtcatcgagtgggccgcaggggtcaacgccgggagcagcctcattgacagcgtccagctctgacagttgcatgtcgccgggggctccagccagagttaacatgagatcgtgacctgcgctatggctccgacgatgcccatggccgtgcccactacccacaccattatttccagtcgagctgtcatcttcaggctgacgcaattgttgccacaagtcccgcagcaaatgcgacccggtatttgggctgccacctcccagggacgcgtggcgcgtatgatgcgacgttgggacgccttctcctcgctctccagctgatccaccaagcccaccgttgacattaccatttccgttctgaggcgttgtgatggtgagaacacggaggtctgggggtcccccactccccgtgaagcttcgattgttggtgccgtgcggtcccatcgagtttggtggacttggcgacacttctggagcgatagggaaggctccgtttgagggcgtggcaccaccagtaatgctgttgttgttgctgttgttgcttgggttggaggagtccgaatggaagaggttccccagccttgacgcacccagtccactcgatccagatccagaggacggcgccggaggcgacacagcttcacgcgcacctgcggacaggaacgctggaggtgacacgagtggatcagccccgcccacgtttgcgtgcgaccgtgctcgaggcttggccccacgtcgacgctgcttcaggttgcgcatgatgacttggcttcgcgtggcttcattcggggacgcggccgtcatgctcaatgcattaacaccagcccccgagaagccggtgccgccatctccagcactttggctatgcaggagaccgaagcgcgacacctccagatctgcgcctcctctcgctgcagcccctagtgcagccattccgcccagaacgccgcctcctcccaaggttaagggagacaaggataatccatccttctgcgcgtcggccacgatctgcgtcgctctcgagagcatggcgtttacttccttcgtggtgccctgcggtcgcaacgcagcgcgtggaacatccgactctgccccaaccgaatacgctgcaggccgtttggtcggctcgggctcctgttgctgctgtttgtgacgataaacccgcttggggtgcgcaaccgagaaaagctgcacaaacccaggactcttaccggcagcgtgcaccacaagcggaacatttttctctcggatggcggcgtcaccactcagcgcggcgccaaagttcaggtcgatccacttgtgcagctgcgccgacacttcatcactctccagcatcgcgcggtggcatcgcacaaacaccgaagcagcgtcttgatccgcttcaccttccacatcctcccacaacgggaactgcaagtcctccatatcgctaccatgcagcgacttgaacactgctgggtccgtgtaaaactccgggatgcactcgtccggcgtccactcgaacatccgcgccatggtggccgggtactcgcgcgcctggaaatccccacgaaccacgcgacgcaacagcgccatcggcgtgcgcctcgccaagtaaatgtagtacgtgatctccgacagactctccgtgatatggtgcggcaccgcgctgctcgcgaacgtgcgatccagctgcgcgtcgcccttgttcagtcgaaacttgctcttgctcaggtcgcgccagcctccgcgcggacctgccgtgaagtccgtgacccagggtaggaacgggtggaacacgccgtcctccatgcgacgtccagcagcagcgttaagcgtcatcaagtactcaaagttgctgatgtccccagtgcaccaccgctccgtgacggacctcgaggtgcacgagtcgacatcaagaggcacctgcaacactctgtcatcggatccacgccgcgcattggcacacgcgtccagcacgcgcggcaacgcagacaggtgcagccacagcgtatcggttaagtgaagatcgcgcggagagaagccgtcgcaggccaagccgcgctcgtgcaggaactcgagcacgcggcgcaactggaacagcaccagccgcttcttgaggtctccgagggagtcctgctgctcttcggtggacgcttggggctcgcacactgcgtctacgtcgatatcacgagggattccttccagcactgtgcggttgtacttgagcacgtcctgcagcgactgcgcgtcgtactcgaacacggcaaaagtgcatgttgaagttgaagtggtcgattcatttgtcgtggaggtggttaacaccccccttaacgccggcaagtgggcgttacgcggcgtcgcctgcacgtcgaacaaacttcgagtgatcttggcaactccgtcctcctcaaggtgcgacggaatgtcctcatataggcgcttgatcacctcgcgcgtggacaactgcagcaccatatacatacgtcatcattttcatcatccccaaccccaatttaacaccaccacaccatgttttgcagcaaactgcagcaacaattgttgctgttgctgttgccttccttccgcacctgttgcagttcgcagctgtcatgttgctccggttcctccttggcagccgccgagtcagccacgagccccgccacagcgccaaaccctagttcctgctccaaaagcgtctccaggtcccccgatcggccgctctcctcgtgcttttgggcgcctttcgccgcttttgggtccgcaggtttgggcacgtagttgcagtgcgtcagcggcggcagctcgcgtacgagccactcggccaggcgcgcgccgtccttcgggtgcgccacgaggcagcgcgcggccgcgggctccgaggacgcgaaggagaagtcccagcccagcgacgcccgcagcgcctcgcgcacgtcgcggcgcggcgatgccatgagccacctacgtagtagtgtagctcttcgtcgggttgccaagtgggacgatccactcgaaatgctcttcaacgttgttgttacagtttaagagcggatatctgcgacgtgtgacaagcgggagcttggcgctgtagacgaggaccgcggaggaccctgatttggatggggaagtgagaccgaggaggtggagaaggagacgcagagatggaggctgcgagtactgtgctagctagcaatgggagtgttgcttgagcgccgcggagctcatgccaacatgaagcccgccggcggacgccatgcggtgccggactgtccatctgcgcgctggatttgcttgccatgccggacgtcatcagcctcaactcgactcggtggcggcgtgtgcaacactgcaacacacagcatcgcggagcggggcgccggcagcgaggatggatctccgcgctgatgacaggactccgtttagcggatgcccgggtccagcagatttttcgaccggcgggccgtctgcacggaacgagcgctgaacgagcagccccgatcgattgctttgttctccaagcaactcaggccgaccccagcagcaccgggtcgaaacgccggagtcgcgcctgcaaacacgccgaggatgcagcccaaggaggcagaggaccgttcgaagccggcgccaaaaaacgccgcagccgcgcgggataagccacgcgttgactcaagtcagtcccgcattgaacaatgcgcggcgccgaggcaccagcgttttagcagtgcgcacgcttggagaccttcgccggccccggagctgccagcgctgctccgtcggagcgcgtcgattgaagatcgtcgcggaccgcgcgtttatgcagcgcgttctgacttcccagctaatttttatgggctggatagtcagcgcgcggcatcctaaaagcgggtcgtaaatcgtcgcctaaatcgtgctgcgaaaatctgcgatggccgcgtcggaacaaactcgtcatgagcccgcactgctctctgtcacgagaactttgcccactgtgctgcccttgctgcaacagcagactccgctcctgcattcgggtcctgcagccgatagcacaacttgcctaccggtaatgtagctttagcttatggtagctgcgaccgtgtccgctttggatccagcagctccacacgttcgtcttgtcagcgtccggagtcagcgtggcgcaccgaactggatccagcaccgctcgcttgacccgcgcgccgcacattgcagcgcagagtctgcatcctcaacgcaactaccttgctacttatgcagctagctgccacgctgcagcgcacgcaaacaccaccgcgggcttgaacgtcgccccacccggaagtgttagcacacctcctcggagccgcatactgggccgattcaatagcctataaacgaatagatcacgagaatttaatcaccgggtggataatgttgcctcataaaaacctctcaacacacatacaatctagcattcagtacgtcccaagcgccaaagccgccattgtagcacaagcccccggcccgtctctgctccgcggcggccgaaatcttggtttccgttttctatggggccctagcccaggctagggctcttccttccccatttactctttcgccgcccaaggtgtgctgcgtgtgtgttgcggccgtgctcattcacactcgaggcacttcgcgagaggccgagaaaaatagccccactcccagcagcactcctccacccacccaagagaagctcccacactaaccaccctgtataacacacaacgccggcccgccatggcgctgctcaagaacaagtacatgcctctgagcgaggcggacgtgtcgcccgagcgcgtggcgtcctacgacggccagcacctcacgctgtcctcgtcgcccgacgccgcggccttcgtcatgggcaactacctgggcgggggcatcgcgggcgtcgtgtacgaggccttcgaccagcgcgccaagcgcccagtcgccgtcaagatcctcaaccccgtgggctacaagctcacgagcccgggctcgctgcgccgcgccgaggtcgtcaagaagggcgcgcccgtggtcggccacgtgcgcggcatgacgctggacaacgtctactgggtgcatctgcccaggcgcagggagctgctggcctgctacgccaccgccgggtcccccgtgctgcgcgagctcacgctcgagatgtgcgtgagcctctggctgctggaccaccacgacgacgagctgcagcccagcgcggccaggcggcgcccgcgcagcgcggaccgccgcgccgccagcttgagctgcgaggaccccgcgggctccgcgtccgcggccacagcggcggaggaggaaggggaggagatggacggggaaggagaggtggtcgtggttaacgatgtcgcctacgtgatccccagcatgccggccaagtaccgcgcgttcctgcaggcgaggaagaccatctaccgggagatcgcgcacatgcacaagctcacgggcaacagtgtgagcggagaacggattggcagtggacacgagaacgtgctgcagctttacgacgtgctggagctggtgcagccgtccaagtcgacgatcttcctcgtgctggagctggcctacggaggagagctctttgaccgtattagaggcgactcgggcgtcgaggaggacacggcgaggacgtactttacacagctgctggctggagtgaggtattgccatcaactgggcattgtacaccgagacctcaagcccgagaacttgctgctgagcgacgcggacgtgctcaagatcgcggactttggcctttcggcgcactttattgcggccgtgagcagcggagcgagcgccgacgagctggacaacaacggagagggcggacttaccaacatgatggcgccctcgcgcttccgacggttgaattccatcgttgggtcgccgcactacgtggctccggaggtgttgcagaacgcgcggtacgggtacgacggccgcaaggcggacatgtggagcagcggcgtcattctgtacggacttctggtcggcacgctcccctttggacgcgatctggccacgtgcccgcggtatctcaagttcggcgagtggctgcggtctctgcccgtggacccgcacactggcaagctcctgttcgacgccaacctgttccagactggcggcagctctagcggctctaaacaggagatgccggagatatcccccacccacccaagcttccacgcgaccccgccaatgctcgggcttatgctgaacggctccaatatgctgtggaaccagaaccaggccgccggatcgtgctctgcgtccgcaagcgccaacagtccgttctcgtccgacgccggtatgctcaagtcgggagctgctggcgtgggcggcgttcagtcgcgacgatctgtggccttcccgacgtggttcttcccgccgacattatcacccaacgccgtcttcctgctggcgtctttgctgcaccccgacccgagcaagcggatttcatgcgaggaagcctgcaagtcgagctgggtgctcgatgtgtagcccacctcatctgcccccaccatctcaccaaaccttgtgccagacatgtattcactcaacaacaccaagtactctagatgcatagccactcaaaccaatcgtaccaaataatatgtatttgaatatcctacgtcgccgctcgcgtggctcatacgactgaatgccacgtgggcggctgccagtctgcgatcccgttgcgttcactcagcctatagactaacgatcaacttcatgtgtgcaacagagattacgtgctagacttagagcctacagacgtgaagatgcttggaagtcgctcttgtagcagtggctgagcctggacgaagcggcagatatccatgacgttcacgtgtttgagcttggcatgatccttccggaatttggcactcaccgcgttcagctgtgcctcggtgaactccatcttcagcgagatgaagatggcgtccagctgcgcgactggaagactcaagacggtgctggcgtctcccttcgttttcttcttcttgctggagctggacagtacgtcctcgaatgctatggtgactcggtcgtagagcgcttgctgttgagcctcttcagcgttcgcagcggcgatcttgtactcgagtcggaggcgcgtcaccttgcgcatggcatttcgacggcggtatcgagcctggattttgcgagcagcttcgagtctgttgacgacgtcctgctccgcctcaagggctaagcgtcgggcgcggtcgtcgtcttcagcttgcttggactgccaccgtcggaatcgtgcgaaggcgtcgaactgctcttcaacgccagcgtcttccatcttggccagcgctttcctgctacgaggcgtaagcttggctcgctcaatgcgtctacgacgatcgagcatgttctggaagatctccatggtgcctttacgctgtggagcgagagatagcgcgaggaggtagtgcgttatggcctcgtcgtactgatcgtacagccattggacgcaagcggcgtagttgatgtgcgcctcagcatcgtcagggttttgcaggatcgcctgccggaagaagcccaggaacgcgaccttgtatttgacgagcgtcggatctgccatttttcctctgaagatcatctcctcgacgagcgttgtgtcttcctcctgcgtgatgtacaagaagatgccgtacgagaacagcacaaaggggatgtctggtccacgctgggccatcacgcgcaggagtctgccgtaaagcggtcgcgctcggtcgtagtcgtgcacgattgtgtgcaagtagagcacgtagttgcccattttcaccaagtgagtcggatcttcaaggtactcgcgctcgcaagttttcatgagtctcactgcgcggaggaccatttggaacgagatccgagccacgcgcgcccgccaaattgcctgcagagtttgcgcggcttgctgcatcttctcggtgtacccccagcgcaccaactggcatctagtctcgaaggcttcgcggtcgtgcgtgatccaggacggtggtttctgccagctacaagcgcgtgttacctggtggcaatagaacaacacaccggggaagtctgcacgtgcctccatttcgtcccagaccttgaaagaccgcaccgctgtcgcccacttccgtagtgcttcccactcaaagtatcccttcggaccaagccgctggacgactttctcgcgatagccgagtttgcggcccacatagccacggaatgtgcgttggatctcccgtgctgcaagtctgcgcttgagatgcacttgacgctgcgcgcgcagcccgtgcgcttcgcgctttctcgtatgatgtccacgatacaccgcttggattttcacgacttcggtctgctgcttccgacgcagttcggcttcccgacgggctttccgccccttgaacgcgcgctgtaaatctaccgcgcagcggttctgatggagcagcgccttgacaagcgagtgcgttcttcgagcgcggaagtgacgttggatcttggtggcagcgcgcatctctttgcggatctgggcgctatcttcttcaaagccgcggaagaagcgcatgtactccattgcagacgcgctgggttcatcggcgggcactttacggacacgcgcgcgcagaagcttcatccgcttggagttctgcaccacgtcctgcagcagcgcgtagtcgatgggtggaatggttgatgtgagctcgtctgtgacccgattgtggtacagatagtagcggcgatcagcagctttacgagctgaagacggatcctcctcaagtaatgctactgccggcgtcatcgaggggccgcgtacgatctcccagatttcgcccatggcggcgtcgaattctaccggggtgtcccaagtgtacatgtgctcgcctgaaggccccgcggtgtagtagaacggcacctcggttgacgagtcgacgtactgtgtccactctgcgatggcccccatgcagtacgcttcggatacagctgcagtccactccgctggcgtccgttctttttggacattctcatcgtcagccacttcctctgcagcgctcggcatcgttggtctatcactggaagcctgtcgttcttctgggtgttccgtctcgtcctggttgtcgtcgtcgccctcaaccggctcaagctcaggtccgtctgcgtctttcttgtctgtggattcctgcgcgaagtacgcggctacgaagtcgacgatggctggctggtggttcatgcgtgccatacctaacggggtcttaccctcgtagttcttcaagttcatgtcgccgccgtagtcgatcagcaatttgagtgtatcgactgcaccgttgcgagctgcgatgtgcgtggggtggtttccaagggcattggcacagatcaaggcgccgctggtgagcagaagatgcgtacacgccagcctctcgtcttcaacgcagctcacgtggagcggcgcatcgccgtccgtgtccttcatgttcacatcagcgtcgtactggatgagcagatgtaccagcgcttctcgtgtggctgcgttcgtggcaatgagcgcgaagtgtaaaggagaacggccgaagtaatccttcacgtctgggcccgcgtcagcttccagcaagcattcggccacgtcgacatacccgttgcttactgcgtaaatcaacggggtgtagccctccgagtcgcacagattgagcgcgtcgtagccgaacacctcaagccgctgtcggatgtgagcgaccagcacccggacgcagtcaactaaccctcgtccagcacacgcgtggagcaagaactccgttgtttgcccactgtcgccagtatcgaagctccctgactccagcaacactatcaacgtggctgagtggttgccttccaccgctagttgaggcgcgttcaagaaccctcctgtcgttcgagcttcggtattggctccgtggttcagaagcatgtcgacagcctcactttgacccaaggacgcgcacaggaggagtggagtaaacccttcttcatcgggagcctcatgccacgctccatgctcgatcatgtactctgctaacgcgacccgttcgtctcgagctcgtacgtcacttgcgtcaagtatagcgctgggtggagggaggttggccagcaggaggtgcaacgcggtctggctgtggtagttggcgaggttgatgtcgaacgagttgcgcagacaaagctttacgaggcgcttgtgtcctgccgccgccgcaagatggagaatgccgttaccttcagcgtccataacgtaccagaatccactcgcaatggcgcgcttgacggtcgtgtagtcgcccttgtacgtggcgaggagaatcttctcggtccgcacttccgccgcgtatttcttcgccctgtacccgcgccagatcgtttggatctgcagtgccgcgtgcatctcccagcgacggcgtttggctgcctgtcgaccgagatacccgcgaaacacgcgctggatcaatacggcagcgcggtggttcctcaatgtctccgtgaaaacaacttggcagcgatggcggcggtagttacgctggatgaccagggtgctgtgattgtggagctgaaggagtgccgaccgcttctccttcctcatcgtaacgaagatcgcccaagcaagcagcatcgttctcttcgcggcaagccgtctagcctgagccatctctttgatacgaagctccaagtacgtgttccgcaccagcatatcgaagcacatcccagcttctcggttcctgacgcgacgcaagatggcttcgacccctctgtcctgcatcgacttgatctccccccgcttcttggcgatagttcgacctcgatagccgcggtagacgcgctggatggtgactgcttttcgatgtcgatcgcgctgaaaacggaacacttgtcgcgccactcgacctctgtactgacgttgaatcaagacagcagcctccagcttccgtaccttcatcatgtcgacatagctgacccagcggtggaaccagtgaccctctcgtttctgcatgattgtcgcgaaattctcacgcagcgtttgctgctcgacagtgaaggcggcccactggttgaacagtcgattcatcatgcgcgcctgtaccttgagcagatacttcttggccatcttgttgcgcttggcacgcagattcagctgcttacgtagctgcgcgtgctctttccgctggcggatgaagtgttggatggatctcgctgcgcgtgccatgcgcttttggagagcgaagtgcagcttccacttcatgagcttaaatttcaagaacaagaggttggccttgcgtcggttcttcctccttgtcacgaacaccttccattgatccatcacgtgggcgagctccttcttcttcgaagctgcggcacgctgcgtggcttcttcttcccgagctttctggacgagcttcttctgcttctcttcgagttcgcgcttctgcttctcctcctgctccttcttcgccttcaatcggagctggtgacgttccatgtctttctcgcgcatggcttcaagccgcttgcgctccagctcctgattcttcagcctaatctctcgctctcgaatctgcgccgcgagtttgtcgcgagcatgttgcttggtctctcgagcgcgcttccgagcgcgatacgcgcgctggatgcggatcaccatgcgaagtcgaagctcctccatctgctgctgccatggcacagccagcagcgtagaggccttcaccgcgatgtcgtgcttcttctgcagtctcccgatgtgcgcttcaaagcgaccaagtaccgagactaattccttcgagggtaatggtgtactggtgtcttcgttgaccctcgcaggccctctcacaaccgactgctttggtggagacttcacagccactacctctttccatacgttgttgacgaggttctctccgtccgtgatcttcttctggatatgctgcagctcctgttcctgcaggcggatgcggttctcgagcagccgaagctgcactcggaactggttgttggtgttgctgcgctccatcttcatcagctcgatcttctggttgcgtaaagcgcgctcctgctcggcgtacagcgtgacccatttgtcgactttggagtcaagcgtgatggtgtctcgaaggcggattaaactcgacagggactcgccgtcgtcgttgaatttgaactgagcaaggatgtcttcagcgacttcgccgaacatttgcaccagtgttgtgaggaagatctccgcagaaaccatgaagcgcttctcgtcgctttggagtcgactaactatcggctcgcggacaatgtactgcgccaggaggatgggggctgcgatgcgagtagtgctgctggaacggatgcgtcttgaatactcgaacacacgctgcatcacgctctcgcaagctgctttggacaggaaaacctgcttggtgccgtctgggatcaatggatgattgcggagttcaatccagttggctgcgatatacttcttcgacccgctggcttgcgatgaatgagcctgcttctctttggccgcgagatccagatccagttcctcttgtagatggctacggacaaacaggaagaagaggagtgcgtcctcgtccagtatttctctcaagaatgaagcgaacagtgccacctgcgggaactcatcgcgattgagctcgatgttgtacatgaggtccatgcactcttgatcggcgagctctggcaatccgagcgaatggtggatgaatctacgtgtgaagaacggcatggctagccaccctggagtggtcatgcgactctgtggcgtagccttcggctttgcccatgaatctgacggagtcgagtcggcctccaccttttccgaccccatcttcagtaacaagatgtctccaagagcgttgtaaatcacttcgatcgtacggagcagccaattgatgccgcgttgtctaggaagcaagctctttggtgtctccgtcggcacaacggcctcgaagaatcgagggtatcgtgaccgcaacatccgagtcgacactttcgcaggagttgaatctttctctggctcgacgttttgttcatcctgattccgcggcgccaacgtgtcaggtagtgtcctcgatggcggcttcgccagtggcttattgtttgggccacgaccggcttgactatttgatgccgctattcgggaccgatcaccgtctttgagagctgtcctctcctcagctgggagcagtccacgctggctgcgagatgacacggtacactaagacaacagccttcgctcaatacccatgcggtatgttcatgctacttgcctaccgtagctggcaattgatgtactcgatcttgtcaaggtacggcaacagcattttcttctgctccaagacttccacgctcatctaatcccaccaaaggtacccccgatgccgttatttcaacacacttcttatacacaactcctgatcacagcgcgtacctgagctggcagtgcttgcttctccggcacaattgggcggctacttgcgatgacttcattgtgttgaacttccacttgcggagccggagattgctgctctggatgaagcatggaagccagccacgcgacattggcgaccgtctccaaatcgctagcgctctcctgccgcttcttcttcctcgttcgctgcgcgccggcagccaacgacactgcgctgtccaattcatacggagagcgctttgtcatgacgcaggtagttgaacgtgctcaaggtcagaaaacaccaagaaaaaataaccgcccattcgtacacgcaaaagtagcacggttcgtacgagtaaacactacacttagtattactatgtccggacaatagattaaaacctcgtgaaggtatccaatgatcacactgtctaaagcacttcagcgcctgttgccgtagctctccacatttactcttcgcgtgctcagctcgcgcttctcgacttcccgttgagccgccgcttgcttcaccagctcgcggatctccgcaatatcacgcagaccgcgacgcaattgctgctgcatcgtgtcgaccgagtcgcgcatgaccttcaggtcttcgctgtcgatcgcgatctcgtcgtcgctctccatctcaacgaagggctctttgggggcgacagcggggtattgcctcctcctgtactggaagagcgctcccagtaggagctgccggtgctggagcacgaacttggcctggcgccgctgtagcgcgcgacgccgcagacacgccttcctccggcaggagcagcgtcggcacgtttgttctgaatgggtcgccattgcgcgatggtgtgtgatacttggtcgtcgatagggtcttgagtgtggagacccacttcacgtcgagcacgtaaatcgggaactgagctctggtcgtgggagctccgagttcgcggctgccattgaatcaacggcggcggctgacgcactcccaggggcaaagaagccgctcgaagacgacgagcgccgacgtcccctgcacagagcggtttgaaaattgagggtcccaaaaaggagaggttaacgtttcatcgtcctcgggccgtggggttgccgtgccgagctgggctgcaccagcacttcggcagtgttcgaggcccaggcgcaagcacgacaaagggggcaatttgaatcaaagtacagtatcaaagtttgatgaccggcggcaagccagcccccatgcagaggcggtctcagcagcgatttgacttagccgccaaatcgctgctgagactgcctctcgcgccaccgaaggcggccgaattcccctgctggagcagatgcacgctgtgcgttttaactggggtttgtatgggaacttcccattgggaaggcgcaacaaccttccgagctggtcgtggtggagctgttgaagtggcggcggtaaagaaccagcaccgaacccgttatcccttcgttagcattccgccggcaatgggcctgataatgataatgcccttctcgcaatagcacccgtgccccataactgcgttcgtggccacggcccgcaacgtcctgctccctttcgctggggcgggcggcgaggacattggcgagcagccactccgtcgccgtcaccttcagtagagcttgagagctgctgggagtgtcatcatcgcaaggtggtgcatgatctcattcctgtgatcgcccacccgcccggtcatgtggttgtcttggaagtggagggtgtctgcttcgactgcgttttcgtcaccttctgggcattcagccttcgctatagtaaacacatcgtgatgacagatgtctggacgctagtcgtgcgacaggacaatagacaccttttgctcacgttttttacggattctgctgcctccctgagtttcgtaaattgtaaaattgccaacgacaccttttgcccacgtatattcaattaggtacgaatatcaatcttcgacagggaatcgaggccagctaagtaccacacgaactttacagctctagttgatgaccctggcgctaggataaagggtttacactatagctggagtcgtccgaggtgacgagaggaagtcgggttggtgctgctctcgtcctgagtgctcccagcgtttttccgcaaaacataaaagtaaaaaccttcagtattgacatcgggaagcctcgaactacgtgtacatcgggcagatgaagaaactctcgtggatactccagcgttgacactcggtccaggaccagctccttccacccgaaatgagtctttcgtcgcgcgttctaagacggtgaaggtcttgaaccccatcgtctacacacaagcgccttatatcaaacataacgtttccaccgtgtttccgattgatttcagctaagcttaacatgttcgtatattcagacgattttcatccgttcatcatgcagccactcggaaatgtaaaagctgactggtaagaggaccaaatctgctctccttgaaaaatacttctctagctacgccttacggcgtacttgaaagatcgattagacaaccggcaccgcatgcagtttgcttgaagagcttttggtgttaacgtagacttatactacttagagcagcaaacaacggacgcgttggcaatatatacatatcgttggtatattgtcaaaagctcgaacatgtttgcagagtacactattctgcagcatgtacgtcatgcgtgtgtactactcatgcaagattcataagcggatcagctttatcgcgcttgacgaacagcccatccagcacaagatcaccaagtgcgttgagggatgcgattaatgggatacacagaagcctgttcagagccaaactgttggttatgaggcctacaacgagtttttgaccgccttgcggtcagatatggaactatataataactgtgtgcggtagaaaaaatatgtttggcccaactgaccggaacacgtcaattttcatcttctatgatcaaggacaagtgagcataatactcctcgttcggctttacctcgatacaagcacagcggtgctgccgaggtcgtgcagctacgacgcgttgatgcgcatgccgtcttatttgtacaactcgtaaaattactctttaaactcgataaattattttatagtgtttccatataacattttatgtcaaaggtatatcatgataaacagtatgtcgttctgccattttacggaatgacttttccgtattttgtgcggaaacgtgtgctcgaaaacgcgtaaattacgtgggcaaaaggtgtctaatagaggatgttagcaacttcgtaaatagcgactcacatttacggtcaacattttgatgtgtttagttaaaacaaaatcgtcgacagtgttagcattctcgtatccgtccatttacgaaatccaactgactcctagcgagagaggccgccctgctgacacgagatccctgcattcgatgccatgctgcttcgcgctctgagcgccccgagtgactgatcatcccaggcgttcgaggctcaacgagcacagcgatgcgtactgcaagaggtacttccgcttcaccgaggatgcgattcgcgcgctcagcgcagcactacatttctcgacgtcatcacccgcgatagaatcaaacgctacagtatcgaggcgctgggcatcttcttaggttgacatatccaaaccaatagtacgatcaggaactcggacatcactactctaagcaagatattctactttatgctactctttgtgggcaatggctgcctactctacttcgacgcgccgttatgacttaagacgcgcagccgaatcgtcgtcatcctcgtgtgcctcgctgggagaggcaaggacgtcacacggattagggggggggggcacttgagactggatgaggtggttcgagtgactcgaaccaccgcgactcgaatcgagtcgcggcgctacatgttcctgtaagcgccatggggccatggtgctcgagggggagatgcaggatgagggtaacgagccaatcagaaggcttgtagtctcgtgaaaaagccttacgagtttctcgggagattccgtactaacacgacgcccctcttacgagttcgggaacatagacagcggtggtcgagtgtctttgtccccaactcgtaaaataccaatttgctaacatcctctaatagcggtcgctgtagaaagtcaaacacgtcctcttcgagatgacaaatagcgtacgtagctgcagactccggtaacctccggtaacaagcacattgagctcgtcagtcgcagtggaaggagtcgtcactacgcgcgtgcaggacctgcagcaggtgagtgcaggtgactgaggcaacttttagctagtttgtggtgcctattagggcctgtttcatttgagaataactggaataagaatagcgggagttattcctcccgcttaattacgacaaaatgcgataatcttattggctaagaagttattcctaggaataagttaatgctcagggggtccaccttttgggaaatggcaggtggagggggtccacgttttgggaaatatccaataagttattctgactttgaaagtcaggatagctattctgagcggaatagctacatggccggggcttcctcacctctccgtcgaggaccccagactccgcaggccagccgctgctgacgctgctgggagtgtgtagagacttcgtggcgaggtgaggaagctccggcctatacaggggttggttgcgacagggtagagcagctttagtgctcctctagagcccgctcggggcctcaccacggcgcgcttagtgacgaacagcgagcagtgctcgaagcagtgttcgtgagagcggacttttgtgaatgtcgcgccagccaatgatttgcttccttccataacgcatattctttttcccagttattgtggggctttattctccacctgtttcgtttgaatagcgtagaattgttataccggctcggcgctattcccgacttattctcaaacgtaacaggcccttatcgtcttggaagagtcaagtcaagttacttaacgccttcagcagagaggaacactgacaattgatggcaggcgatgaacacccagaacatgacgatccgtcaaactcgttatggtacgtatggcgtgaggatggcacagagagaatcagcccaagtgtccaatgaccaacaaacagtgtcgcgacgctctgtagtagtggagcatctcagtcgcgttgctccgttgagttgcttagggggccgacaccctgcagtggaacctacactgcaagccgacgtccccgctctccaaccaaatggatctaatgaagctgttgaccatttcggtctaagcacatctagaaatatattagagttgcagttcagaccatcacatcagtgcacaattaggaattaggaacactacttgacctgcaggaagaagtcggaactacatcgcgagctctgcatgctgggggttgcacccccagacccccgcattacaaaactaacgggtccgttcgctggaaagctcgtcgctgggcccgcctccgcaaataccgcgcggccctgcttcgcgggcaccttgctcctcacaaccgctcgctaccgcttttagtgctgattgcacgcgagcaggtcaatggtgctcttgctggcgatagtatgtctattcttattttcttaaacaaactgtaggagactcagtctgacgcgcccgtatataagcttgctgaccctgtccccgtcgctctaaatcagggtacgaacgaatcgtgtacctccgatttaatgacatacggtcactaaaatccgcatctttatgcagtgaaatctcaaatcctgtccacttcataattctagaaatgtcagtaagcacaggatttttttttgtcagaaatggccctgggcgactcatccagaatgtcagccctaacccgttccttctaaactgatgtcagataagtaaatgagggtatggacccttgaaaaagctaagtaaaagtgagtgcatcgacttcgcccccccaaaatagcccctggacaattgtgtgtccctccgttcgagagtccagttcagtacaaatgatcaaggcggcgattctggcggcagcggcgctgctgctctcgggcgtctgcgcgctggacgaggccacgctgcggctgagcgtgaccaaggagcgcagcgcggccgagtgcgacgacaactgcgagcgcgacttcatgcccgtgtgcggctcggacggcgtcacgtacggcaacgactgcctgctggagttcgccatctgcgagaacgcgaccatctccaagctctcggaaggcaagtgcatcaagcattcgacgtagatgcgacagaagagttttggggccgagcagtgataaaacagaatacatttggatgtgcattttcagtatgatgcgatgatactattatcggggaggaggcatgagtaggttccaggccagtaaatatatgaataatactcagtcgcgcatcagaggcatcacagtttgccatgtcgatagactttttttactgggttgcagtatacctgtccgtttcgaccgcttaccgagatcaaacggaatggccttagctatactacagaatgcggagaagttgaatgcgcagcactctattgattctcccccgattgcacgatgaatacagtaccatgaatactgtgcaacttgagcaaatttgttaggtattttaatttggtcgctttgtagttcgagtaaatcttcgggcattcgttgttggaagttgcatgatgcaacgtgctgatggcgttgcgaactctatcgtgccagcatattaccgatcatgagacggatcttgcctccatttgacaataagacaagatcggctaatgatacgatcctcccaattttcaagaaaacttcccttgggtgcgttaccactcacttcatgcggcaactagggcagccacattactactgtaggcttgtactaagttggggcaacgagtgcctgtcggaattcgcagaattttttaccggtacatgcaagcagaatatggcacactttgggcaaagaaaacgggtgtcttaacaaaacacgccttcgcagaagatccaatactgtagtatttcgaggccggaaggagcacgctttgcattccaccattattcgggagttgtctgtgccagcatattacctagtgatagacgcttctactcttcttttatgcagtgctcactccgagtgtgactggtgttaataaaaaaaaaataaaacaaaaagatactaccggtacttcttttgataaatggatcttgacaataggacaataccgactaatacactacgtagtattacatcaatctctgaaaagacagttttacgccacgactcagttcgtgaggcaaggtgaggcggggatgctgcattgcattgtggcacgtgacattgctatgcttcactcagcgccagccacgaattcctacaatccacagcgaaatccaccataaacctcgaataatacagcaataaacggtacactacctaccgtaattatagtagtctcacatgatgggagggttagggtatccatgttgcagcctatttgacaaaatgcatgattgattggcgaattcagacgaattagctgattcgatttcggggtctgttgctttcataggccaaaaattcgatcgtggacaacttgtcaaagtgcgaattttgtacattttctgcaaaaaacgaggtgagactaattacggtaagcagtgtaatgaattaataataaacaacgaacgcgcggcacatgcttttaacgtgatagtgaatctctagccgtccgtacaatggactcccggcagccctcactttgcttttttctttatcctgaccactcgctcacgatgaagcttttctccgcctttttgccgtgtctttgctggtagcaagcaccacgatcatcgacgcaggcaccaacaaccttccccaggtccaagttgactccagctccgactacaagcaaggtgaagtcatgcccgccgatcaaacggcagcaagtagcgccgaagtctcccaagaatcccccactcagggcaaccccagccaaaccaattctggtaactacgaccctgctcaacactccgggagctatggcgaatcccagaagcagactccgcctgtcttcacgggcaagtgcactctcactggagactacgtcaacaacacagacgtgagtgcgtgcaacaccatcgtcatcgactctctccgggtgcctgcaggcgtccagctgaatttgactcagttgcaagacaatgccaagatcaagttccagggcacctccacctttgggccgaaggtaagttctgtgcgccactgatcagacattcccctagtttcgatttgtaaagtttttttataagttttttcttctaaactttatgcatttctgctagttatggtcgggtccgctggtcaaggtgagaggaaacaacatcactgtcactggtcccggtacacttgacggccagggcgcttggtgctggccccaaggccgaaaggtcacgaagccggtctcctttaggatcctcgagacgaactactctacattttccgggttcaagatgttgaacatgccgtatcgcacgttcaacgtctgggactcgagctacaccaccatcaacgggctcacactcaactccagcgccggagatggggtcgccaaaaacacggacgggttcgatctgagccggaacaaccacctcacgatcaccaagaaccgcatctacaaccaggatgactgcctcgccatgcagtcgagcgccaacaccgtatatagcgacaactactgcagcggctctcacggtatttctatcggttctctcggtggcccagtgctgaattcgtcctacacggtgaatggactcaaagtcacgggaaacaccattgtgaacagtaccaacggcatccgcatcaagaccaccatcgacctccaggggctcgtcaccaacgccgtctacacgaacaaccagctcgtcaacgtgaccaacgccatcgtgatgcactcggactacaacaagaccaagggcggctattcaggcaaacccacgagtttggttgcgatcaagaatatcaagatcaacggactcaagggtacggcgacaaacctgtacgacctcctcgtcacagtaaaagaaaagtcgcaacaacaagtatattttctcgcgatcccctttctccgcgtactttgtagtacgcggagaaggggtcgcgagaaaatatacgtgttgttgcttcttttcttttactgtgactagcaaagacacgaccatgcgttgccgtagaaaattgttgggatcgatgcgcagaacgaggccgactcttgaggaactgtatttgctactacagtagtagaaaagcggtcggaagttcttgctcggctgatagcttacaaaagaaccagttacgaaggtaactaaacgatgttacgcgtagatacggtcaacaaaacgaatctaatagggttacaaggtattgtgcctttcacttataggcaacccggagcgttgctccgggatggtacacaggtcgacgaatagtttcatggacgatgataacggataataattgagtaaatccaaagttgttttgtttttaatccttaaaagcactaccagcccaactctctactcattccacaatttatcccccaagccctcaagttaaaagtttctttgtttgttttgtttttgaattgaggatcattattgtcacttagctaacatcctcaagttaaatggtcaagatcagcgcaccatgcgtctcttcttcgttccgtagcatcttcggctaagagtgattgtgtattgagcaaattgacatgtaaaatgcagcctccagctagacaagccatgttgttcatctccagctaagcttggtcgattatggcgcaaattgatacgccttcagcgaagccatgacgctttcatactgtactagagcgtccgtaagtgtttgaatgcaggttttggtcaataataaaagattagtatcaaccttcggtaaataatgtgcataaatcttagcatttatcgacgggtacccgattccggcagatattagtttaacacttctaatccgaagattattccggagaatccgtaattcctaatatattaattaacgtataccgaaaaatcagtactatatatcatgtatcaagccctttcgcgtgccacgtggcctaaccaagatatttgattgggcaatgcggtgggatgggcagtacagagcatgaccaacatactcccaatggcgatctccctgcgaaaccgttttcccccttgcagcgacgggaccgatagcacaacaagcattcagcacagtggatctcctttcacttgctctgtcgacctaacactttgggtcaatcttttcaaccaccttagctacttctggtatgcgcacgctgttgccgacagtgttgcgctcttgccttcgtgacgtacatgggtaccaatatttgctgcctagcccaatgatatcctacaaacgagatcaattgacgaaaacatgaacgatgtttcagagtgttcatgttctcttagtggtcttcaccaagtgtatggtgcttgcgcagttttgacacgataacgctttcatctcatggaagccattggtagctggcattgggccatttcattatgacgtttattgcgatcatgcggctatcgtggttatctacgaggtaatccatcgatctcgacttgtcaatgagaacccgagtcactataatccttgcttgatcccacgcaatggtttcgtcgccacctccagcatccgagtagagcaagagggtccaaacgtcttcttcaacattgaggtcatcctgatcagcatcggcgaagagtcgatgacgccgctgtgcatccaagaagctgtccaagtcaacgtcgtcaagcggaacagcgctggccatttctggaacgcaccgcgctgtactcttcccctccgtaacgcctggttcagccgcatcctctgtcactaccgccgtctccggtacgccatggctgggagtctccacaacatccatcgcctcatccgaaacatcttctgctgtattctccggaaggtccgctggcgtcaccgttgctgcagataccgtagaatccgtaacaacaataaagtcagtatcattgcagccaatacatctcaccacaacatcgtacccttcttgcgttgcttcgaaggcgccctggacgtcatcgccttgcgcttggccgccgctccacaccttgtcgccttgctagccgctcttggagctcttgccaccttggccggagcaacggcagtcctcgccggagagtctcaggagccgccttcgtcgcttgtataggcttcgtagctgcaagacgcttagccgctgcctgagcaagtggcaggcccgtcgtcgtaggagtcgccgtggccgtcgcagcagtcgccgtgcctgtcggtgccgtccggtccgtcgcagcagtagctgtagccgtcgcggcagtcgctgtggtcgttgcagcagttgctgtggccgtcgcggccgttccagcagtcgccgtgggctgcccaaaggccaaccagcctttccgccgacagtatcacagcaaactagtttcacctggccagtaaattggagtttagtagccgtaagcaacctcaacgcgctaaaataaacgtaccaacaaagtagtcgacgcattctttcctttgacgttcccaccgggtggcaggtccctttggccgttgctgagtcccgttaatctcttttaggtccagcccttcttcgtcaactcgcgccatatctgctggaatgacttctcgaacgcgttcatggcgccagagtgatggtgtcttctcggccgccgatatcgaaatgaaaggctggtgacacccacgcgttctccttcggaaatttagatctggtcccccaaccctttccgaaaatcttcgtgtcgcatgcgatatggactatacagctgacctgcttaaatttatcgcatacaaacttctatatgtggatttagctcactgagaattcgttgcggacatggctgaatattttcacctctataaattgtattccggagaatccgtaatgtcggagtagaagtgttaaacattacaattaagaaagaaagacccggtttggtacccggttgtggaaagttacaagttttttgccggggccaagcacaggtcttcgacctgtgaattctgccatgataattttggcataactctaatcccttatcgaccataattatgctccgagttagctaatttccatgttaattccgggtcgcccattcgtggccgaattaggagcggcgatggtgaggccgagttaaggcggaataagctaatccagtctgcgttaggcggaaacagagcgattggcggtttcctacccgccaatccatgccattctgctcgtatctccatcgattgctcttaaatgctgatcgcggatgttaggggaagctctcacaatcttaggcagaattagcactaaataagcgttgatcgcccttttatgactctaattccgcctgaattaacagctcacccgccaaaatacgtgaaaggcacaatacatccgcactctaagagcatctccaccggtttgagtaaatgctgagcaaattcctccattttttacgcagatcaaatttttgcacaagtttgcctacgggggagactttgagtaaaaggttgaataaatgtcgaccagccagtagtagggcctagtcgagcgctctaagcagcgcaagcgtcacagaccgcagtgtcgcccatgctacgtcatccctgggtcttcgtcaacgtgttcccgggcccgttttcatctttatagggctatacagctaggactcgttgtcgccattgctggcgccgtgctaagagctttaacgcgctcactgcaagtctcaatgaccggtggagctgcgcactgtctttagcacggttgtgccgttgtagacacagatctgaaggcaatttgcttttagttttactcagcaccggtggagatgctctaaagagactacactgcagcgaatttcgcaaataccgacaatacaaacggtataccggccaaaacccacaatttcatatcagatttccctccttctgattcgctgtctaaaagtcccgtcgatcctcctctcccatctgattcgctaccatccaccgaaagtaccggttcctaatcggttctgctttgtcgcacgaaccgtcacgtgccacacttcaacggatcatccttgggaggaataagtgcatcacaacgtcatcttcctatccaccccacactatcctaacagctccaccattgccacaccatgggcttctccttcatggacctgtccgtgaaccgccgagccgctgtggtgtccgtcttcatcctgctggccggactggccttcgggctctccctggacgccaacgcgcacatcccgcgaccgtggaaccgcgtgtccagcatcatcggctggatctacttcttctgctggagcgtgagcttctacccccaagtgttcctgaaccgccagcgccgcagcgtcgtggggctgtcgctggactacacggtactcaacatgctgggcttcacgtgctactcggtgttcaacgtggcgttctactacagcgagagcgtgcagcagcagtatatgagacgtcatggcggccaccgcaatgccgtggagctcaacgacgtcttcttctcactgcacgcagcagtgctggtcgcggtgtcgctcttccagtgtgcgatctaccctcgtggagggcagacggtgagcaagcctaccattctgtggacgggtgggacagtcgtcgctgcggtgctgtttgcattggccgtgctgtttaccggtgacaaggaagactccgcgatcaacacgctcaacctgctctacctgctcagctacgtgaagctcatgacgacgctggtcaagtgcctcccgcagatcgcgctcaactaccagcggaagtctacggttgggtggaccatttggaacgtgctgctggatatcgctggaggattgctgtcgatcggccagcaggtgctggatgctgcggcgaccaacgactggacggctatgactggagacccggtgaagttctcgctgggatttgtgagtattattgtggacgtggtgttcatcctgcagcactacgtgttctacgcggagaacaaccactttatgctgcacggaggagaggccaagccgttcttgcccaagtaaaggactagtactgtaagaaacgaatgttgcgagcgaattagaatatgaacgatatcaaagtatccgtcttgagaacaatggatgtactgggtggtttagccctgttccaagcctggtaaatactaagtattctactaaagtagtagtagattcaattcgtatttgcttcggttgcattgatttccctcctgtagccttgcatcttaaacccaaaatggttgcttgcagcattattcttgatttaaaaagaaagtaacagaagaatcatgcttaaggttcagttactagcgcgttgaaacgatcaggttaacttaaggttgtcgccaagaagaacaaactcctgctcaggcaaattttctctaaccgcctacttgtaagtattcagtaatttgggcgaagctgcttgttgcctgctttcgtttccaatacttcggactcgtaacttttgcgtacatttcttttctcaaacaatctttaccacagtactgcacctgcaactttttaacagatatagacgtaacgattagatactagaaccgatagtatatcggtacagtgctaccgatcggccacatcatcatcgagataccttcgaggaggtatcctatcattcgaaggtatcacaacgattcttcatcatggatctggccacgaaacactccgcgaccatcgtgtccgccttcatcttgctggccggactggccttcgggctctccctggacgccaacgcgcacatcccgcgaccgtggaaccgcgtgtccagcatcatcggctggatctacttcttctgctggagcgtgagcttctacccccaggcgatcctcaaccgccagcgccgcagcgttgagggactgtcgctggactatgcggtactcaacatgctgggcttcgcaaggtacacggtgttcaacgtggcgttctactacagcgagagcgcgcaacagcagtatatgagacgtcatggtggccaccacaatgctgtagagctcaacgacgtcttcttctcgctacacgcggtcgtgatggtgaatgtgtggcttgcccaatgtgtgatctaccctcggggaggacagacggtgagcaaacctaccattctgtggacgggtgggaccgtcgtcgtcgctctactttatgggttggtagtgctgatcacaggcgacaaggaggactcggttatcaaccactcgatctgctctacctgttgagctacgtgaagctcatcacaactttgttcaagtacttgccgcagatcacactcaactatcagcggaaatccacggttgggtggaccatttggaacgtgcagctcgacttcgctggcgggttgctgtccattgcgcagcaggtgctggacgccgcggcgaccaacgactggacggctatgactggagacccggtgaagttctcgctgggatttgtgagtattattgtggacgtggtgttcatcctgcagcactacgtgttctacgcggagaacaaccactttatgctgcacggaggagaggccaagccgttcttgcccaagtaaaggactagtactgtaagaaacgaatgttgcgagcgaattagaatatgaacgatatcaaagtatccgtcttgagaacaatggatgtactgggtggtttagccctgttccaagcctggtaaatactaagtattctactaaagtagtagtagattcaattcgtatttgcttcggttgcattgatttccctcctgtagccttgcatcttaaacccaaaatggttgcttgcagcattattcttgatttaaaaagaaagtaacagaagaatcatgcttaaggttcagttactagcgcgttgaaacgatcaggttaacttaaggttgtcgccaagaagaacaaactcctgctcaggcaaattttctctaaccgcctacttgtaagtattcagtaatttgggcgaagctgcttgttgcctgctttcgtttccaatacttcggactcgtaacttttgcgtacatttcttttctcaaacaatctttaccacagtactgcacctgcaactttttaacagatatagacgtaacgattagatactagaaccgatagtatatcggtacagtgctaccgatcggccacatcatcatcgagataccttcgaggaggtatcctatcattcgaaggtatcacaacgattcttcatcatggatctggccacgaaacactccgcgaccatcgtgtccgccttcatcttgctggccggactggccttcgggctctccctggacgccaacgcgcacatcccgcgaccgtggaaccgcgtgtccagcatcatcggctggatctacttcttctgctggagcgtgagcttctacccccaggcgatcctcaaccgccagcgccgcagcgttgagggactgtcgctggactatgcggtactcaacatgctgggcttcgcaaggtacacggtgttcaacgtggcgttctactacagcgagagcgcgcaacagcagtatatgagacgtcatggtggccaccgcaatgctgtagagctcaacgacgtcttcttctcgctacacgcggtcgtgatggtgaatgtgtggcttgcccaatgtgtgatctaccctcggggaggacagacggtgagcaaacctaccattctgtggacgggtgggaccgtcgtcgtcgctctactttatgggttggtagtgctgatcacaggcgacaaggaggactcggttatcaaccactcgatctgctctacctgttgagctacgtgaagctcatcacaactttgttcaagtacttgccgcagatcacactcaactatcagcggaaatccacggttgggtggaccatttggaacgtgcagctcgacttcgctggcgggttgctgtccattgcgcagcaggtgctggacgccgcggcgactgacgactgggcggccatgactggagatcccgttaagttcttgctcggccttgtcagcatcatcgcggacgtggttttcttcatgcaacacaatgtgttttacgccaagaacaactgctttgtgctgcgtcgcagagaagttaagccgctgttgccaaagtaaaaggagggagtgttgccagtagatttctaagctactggccgcttcattttcgcgagtattatttcattctatttttttcatcacttggacttctaagcaaccgcgttgcttacaatatttttttcagccgagttttctcgaccccctacatctttgcaactcgagatcaatatttcaagcagttgaattcattgtcgggtgtaaggactcctcactgaggagtaacttgtaaaaaaaaagattcagacgagatgcagttttgctggacgtcagagctccttccgttgagttcaaagggtgcaattaagatgaatttatcttttatcgaaccagcgccaacatgaaccgggttaatgcgtccagaaatttcttatatgttgaaagagaataatcacaatttcacagtgagctaacgagactaccgaaggaacacttactacacgtagatccgcctagtttacctacagttcacctagagcagcatggcacccgccacgagcagcaacgtcgagacgaatcctacactcacagttgccacagagctggagcccgtggtgcttcccccaacgaccttgttagccgcaccggaagacttcatcaacccggacgaccctgctgcagtggagcctgtcgacgtcgatgaaccacttccgccacacgcagccgccactcggtcgaccacatccgtcagcacggacacgcttgagcctggaatgggtcaccgtatcccatggcggctcccattgcgacaacgtctttcataagctcgaggcacgcggtgctctcgcaaatggtcgaaatctgagagtccgtcaacgtcgagatggtcgccacactgacacccgtttcggtctggcaggtggccaggttcgtgttgctggcaaggctcagcagcgcatccgtggggcagtcctccgcagaacaggactagcgatggcaacgctgagaagaacaatcaatgcgaacgaaggcatgttgacggggatcttgagaggagattagtcggaccggagggtgctactcgaggtgagttgaggaatcacgcgcgcagggcgcaactgggcacctgaagcttgacggtgttcgaacacatcgaggaagagggtgcatgtatgttccgaggaactgaccacgtggctgggaccttggcgaagcaagaaacagcaggggctcaaaacgctgtctgtggttgcgttgcgggcggttgcgacaatcgcagacgcgagaaactggtcgccggactgttgtcgttgtttcttaaacatcggtaggtgtctcttgtcggtggactccatggacattcccccaagagagtcactcggataggatggcgctagaatcaatgcgttgatgccaccgtccaataaagtctcaaaacgttcgttagtacacgtcttctccttgtttgctcgcgaaggtgaactgataaacaaggagaagacgtgaaggaacacaccagctgctgtatggagcgtagcgactacacccttcactctaaatatctgaccctgccaatttcgaacgactgcactgagtgctgccgcttctcgcattgttccatcctcctgttaacgattatgtgcccctgtgtgtctaaacggtccctgggaacaagcaccccgaggtcagcgtcaacactacattggtataatcgccgctccatcaacggtgctaccgcataatcagtgccgttgtttggtgttgcgcagcccgcatgtaagcttatggaaagtagcgctagagagatttatctaacttgaaatgaattcatttcgcaacttaattcaaagcgcgcagcgtcgtgtatgggatttcccttttccgccaacatgcagcttcgttccaggtcaacaattgctgcacttgtcactaccggaaaagtcgtattggtagagcacccggaaagatagagcacctagcacattgtcttagtaaatagttcaaggccatattatgcatggacgaggtcacgacaggacgcaatgtagggaaaatgtattgtgctttgcaaacgttttgtcgttttgacttggagctttcctcgagttataataaatcgagatcgatttaataaaacgagatcaaagaaagggacagatcgatctatttaggcggctaataattcgacctacaccaatccaaatcagggttcgaggtcgatctcctggtgaatttgagtataacgaggtcgatctacggtaaatcgatcctttttgcgttttcaaaagcgcaattcgaggtcgatctaagtaaatcgagatcgtccatgctaccccctctcagagggccggtccacaaatcaggacacaaatcagaggggccctctgatttgtgtcctgatttgtggaccggccttcctcgatctaggccataaaacggggcgacattttatctgcaatgcacaatacatcgtattaaaacacggtgaggtgcttacacagtgcttacacagttacctcttctacaatgtccgtgtagtctacatggttgctgcgcttgggggcaggcgcgctggcaacattatttggaggcccctatggcaggaaaggacctgcctttagaaacgagttttgaactgtcgtggcggaaacacaacgaagcccctccattgcacgctcgaaaatctgatgccgacgaaacgcaggcgttacagtcttcggtcgtccgacggaacgcgagctattgagacgacgaatgtgctgcttgacagggaccataacgcctacgtcgagaggctgcacaacaccggtgcagccgccaggcacgtatagcaccgaagtgcccgtatacgccaacgcgtcggcaatttccgctttcttgtgtaccgataagctatcgagtatgaggactgatggctctacaacgatatacttccagcacttctcaatccactccaacatcactctctcatcaaaccaggcactctcttgcaccgaaaaggtagccacgtcttctaagcataacttattcagctccttctcgacgtctccaccgggggcaccattgtaaacaaagtgtggcggaaaaattcttccgtctgccaaaacggtaagcgccatgatgcatcggtaaccttcactctcgtttgtggttgagcgcacagttggggcaccgacaaattccactgttgtccttgtacccatctcccagtacagagaagtttggtccatattgaacagtgcacgtgcaaccgcgaggctagtattagggtcaaagatacaatgctgcgtcgctacctcagtcacttcctcgacaaatggcagccgcagagcttccagctcttctcgagtcttgcggcctgagtggcagatgcgtcgaatggtgaggtggtgccggcgcaggaagcgctggcaccaggacttcttggcgtccgggcttttgggccccatcacctccggcatgagctctgtagccatgtcgatgatgaaatcaaccgttacggtgtgctccagccgccgctcatccgtgataaacacgcacaatgtgtcctcgatcggggccgtgtcgggcttgcggccgctgccgctgagcgtgaggcgggaggcacgggagggaaccggagggaggtaggggctggctcgaggctgacgctgggactcttgggccaggcgggagtacttgcgctcccagttctgcagcgaagggcgggggaagccacttgactcggcaaacgctctgcggcccgtgccgctagcgcgtgcagcacgccagtcttcaacagcgcgcgctttgaagcggttggtgtagtgggtaggtttgcggtcgcggggcatgctgctactggtttggaagtcgggcttctgctgctgctggaggtttgcgttgtgtgcttgccgtctcggagaagccgaaccgttcacggcgcacgtcgatcagtcattttcttccgtgttttataaaatgatgtaattgctactgtgttttatagccattttcgctttgtcgcagtacttgtactaccacaattatcgggatgatacagcacagcgcaacccgcaatagaaaattggggctctatcataacgacttttccggtacatgctcgttgacggtgcggggtacatggtgactcggtttggcgacgataactgtggacacaagaggtccgatgcctttcttctacctcgccgttcgacctcattttgccagctctcaaccatgccagtgtaacatcaggcctcgctcttcgaggagagatgattggctgcccaagcggatccatcctccagacttcgtttggtgggatcgacttttcgttgtgcgtgttcggtgaatccggtgcaactgcgttgtgtttctttagtctaagtggaggccttgaggcgagtgaccaggagatcggcatctcagttagcgttgagtatctctcgagcccgatcaaaagcttctccgcgcctgctctgagcggcaaacgcactgcgtgccccgtgctgattgcgcctacctcggtgacaccaaagacgctagcgctgctgacgggtggtgctatccagcctgctgcaccaagacatttgaaggcagcaagtagtgagagtaagtgcgcgtgcaagtatacgcctcgtccgtgcgtctactttcatggcttggggaacccaaacgaggaggcaggactgcaggacactccgaagttgacgaagaacaaggttggaaacatcggcgagcacccgccgtgctgcatcacggtcaagtacgctgttctcaacaccgtcgactatggctggacgaacgactcactgcagcaaaagttctgcgatcactcccttccgatgagcagcaccagtgacttgaacacgcgcattatcagagacacgatcatcataatgcactcgatgggtggcctcacgatggcgggcgctctcgtcaatgggagatgccgcttcagtgacagcacggcgtgggttagcatgagcgcgccgatgcgcgggagcatggacgcagacttcagccaagacgtgtgcaaaagctcattcctgtcgaaaatctataggcaaagtcccgcctccgccgctcggaagtcgcattcgtaccagaacgagctgaatattgcgtacgccgctgctcaagaggcgtaccgaggcaatgtgactgcggcaatgtgcagcaccgactatcgcggagtgctgtcgacccgtttcgcttggggcatcacgcttggcacagccattccccacaagtcgcgcgaaacgattgacttgtggagtttgatagttgttttggggtctggatgcggcttcgtttggcgacagctatcgcgatcggttctacgcaccgaaactcaaccacgcagacacggctttcctcacgcacgacagcttcttcagggacctccaaaagcccttcaagtggttcgagtgcttgctttaggctacgaggctgcagcgaagcaggggataaataggataaatagccccgaatagaagatatcaacccttgaatgcttccaggacatcttgtggtgctccgctccgtccgaaagcgaaaccggtttgagatccgagatcatgggaggcgaccctcgaggtcgtcgagctcaagtggtcttgggggacgcacgggtggcattctcctttcgaccccctccccgcgcactactaccaaactcaacaccagtctctgatacaacaccatgcctgctctggccatgccagtcagccggcctgctgtcagaccaagcgccgcactcatgactccacaatacacacctcggaccacgatgaatcggaataccggcacggtcggatgtggtggcaccggctggagttcatcccgcagtataacatccgtgaacaaggtcaccagctccgctacttggagggaagaggctctgaacaaggccatcgagagcggagtcgagatcgtggtgaatacgataatcgaatcaaacgagccggaggacgatgaccctttttccactcacctcgctaaaggtaccgataaggttacggtataaggtatagcttaccgatagttcctccgacgtcgagagaatcttctacccagttgctgcaagcgacacctgctactgcgtcacgtttcccgacactaccgactacaagctcacaagttgggtcttgcacggccaagcatgaagacacattgaaacgtctttggagagttttagctaccgtttgcagcacaacgcaatggatacaacgcagcaggctcatctttgaaggagatccagcatcagtagagcaaagttgcgtcgagttccgggtgacgggagttcgtcagttgaaggcaatagcaaggagggacaagatgagtccccaaacggtggaacaaggcaagttgatggaggactgtatcgacagttttctattaatccttgaacaaccaggacaagtacgggtaagcagcatgcagctaccaagagaatcgccattagtggtgatgatgaaatcttctttaggattttaatggctatagtagtccaaataaagttcctttcactactactactacaacgactgctttattgcagcgcaagagcgttgtcaagctcgcacatcgtagctctcacacacaggtatcatctctctgtgcttatgctgatattgtgctttgcagataaaatgtcgccccgttttatggcctagatcgaggatggccggtccacaaatcagggtacaaaacagaggcggtagctcgatttacttagatcgacctcgaattgcgcttttgaaaacgcaaaaaggatcgatttaccgtagatcgacctcgttctgcccagatccaccaggagatcgacctcgagccctgatttggattgttgtagctcgagttattagccggcctaaatagatcgatctgtccctttctttgacctcgttatattaaatcgacctcgacttaatgataaatcgaggagagctccaagtcaaaacgacaaaacgtttgcaaagcacaataaatgtacctctattcatgccctatcagatttgtttggcacttttttgctgttcgcgtgcacttcagcttggaccaccaatcgatcgacttgtctggttcgagttggacaggccgcttgtctgcctgtccactcttcgttgcgcctgaccgtcaggctgacgctcaaggatcgaggcaagccagctctcgtttggttgtgcctcgattccaacgcgtttgaacgagctccgtcaactgagcatactacaagtgcacgctcagcgtagatccggttagtctggcagcgcgttgcatgcaagatactgtaacaccactgaaagctgcttatattttgtctggcagcgatgtagtactacgtggtacgtaaagcaggtctatgtcgattgtattgaggctgtcggtcgcctgtgtctatccttagaacgagacggacgagcgcagctcggtcggcaggcacacgttgccgctggggaggctggccacgtaggcctcgagcgccgagtccacgcgctccgcctcggcctccgacaccttgaccgtggaggtcacgccctcgatcaccgcgaactgcgtcgtgtacaggtagttgctcagcgccaggacgagcttgtccgtgtccaggatctcgcccgagtgggtcgggtggtcgagccacacgaggttcgagagcttgccggcgccctcggccgtgcacgtgtacgtgtagttgaagcccgccgggtgcacgtagaagccgttctgctggatgacgttggcgccgcagctggcggccatctcgtgctccaggaagagcttgagcgacgcgcccgtggtctcgatggtcatgagcgtgttgccgaacggcgaccaggccagcacctcgcccagcgacaggtcgccggctggcaggatcttgtcgccgcggatgccgccgccgttcatgacggcgacgtcggccgaggcttcaccgtagaactgcagcgcggcgttggcgaacaggtggccgatcttgcagtccttggagcgcacgacgtcctgcgagaggtcgagcgactcacagagcttgccgatgatctggcccgagagctcgtccatctgcgcctggtacgtggcgatgatggcgtccagcgtgttgtcggtgggcatgctctcgacgatggggatggcctggtgggtcatgagtgacttgcggtcgtcgttgtcgccgtcggccgcgtagtactcgatgtgcgactgccagaccgagcggaagtcgaagtcggccttgaggtagggcgtgccgaagttggtctgcagcatcgaggtgtggtcgtgtccaccgatgatgatgtcgatgccggccacctccctggaaaggcggttgtcgtcggccaggtcctggtgggtcatggcgatgatgaagtccacgcccttggcctggagaatctccacctgctcgcgggcggccttgatggggtcctcccagtagaggcccttgctggtgtcgttcatgtcgtacatgacgccgaagaggccgatgctgatgtcgccgtggacggggtccgtcaggttcttaatggcgttgggcacggtgccccgcagcagcgtcttgttggcgatctcgtagcagttggcgttgagccacgggaagttggagttgagcgacacgttcatgaagttctcgagtccgaagtcgaactcgtggttgcccagcgacgcgaagtccaggccgatggcgttgtgcgccttgaccatgtgctggccgttgaactgcgtcgaccagagcgagggcgacaccgtgtcgccggcgaagagcacgagcgtgttagggttggcctcgcgcatggccttggcaatcggcaccacgcgcgaggggccgccgaggttgatgccgtccacggtgtcctgcagcatctcgtacacgtcgttgtacgataggatgtcgaagttggccgtcaggttgcgcgcggcctgcgcgccgccagcggcgatggcgcccagcgtgaaggcgagagtcccccagacatgcatggctcgatgacttgctgctgcggagatcgccaattacgaaatgccatgctggatgcaccaacggctgagagggagaccttggcctacagacagagctgagccggtggaattgaagacatacggtgcatctcgcaggagttgagccatggcgggtaggagcatattgacgcacaaacgcttggcaactttgtggccccgccccatcttagccccgtgttacacatcgcgagaaatcgatagtcggatagtcggtccacacaagcactcgaaggacggagcgctgtcgccccattcggtcgcttcgtggtttgtggctcaacgcagaccaaagtgtatccggatggtgagctttggccagaccgaaacgcgatggaatcgccgcatggaagtcaccggagccactccgttttgacatggaagctggatacaggaactggatggggttcatggtggcatgccgccgatgtaccgcttgcccccccccccccccccccggccaagttgaataccccgaagctgtcgacgccgccgaggtgtacatatcgtcgtccgtcgtgctgtgcaaggcggtgcgagcggctttttccaggcgaccgcatggtgctaaaaagagtcgcttgtgaacatggcacggcaacgggtgcaggtctcagtccctggagcggggctctcctccagtgctttcgcccaggagcactgaggcaggccagcaacgcggcgccttgatggatgcggactccgcattgcggagacaatggagcgctcttcaagcgccatggaaaagactggaacacatcctagctcgactccccgacagcacaaccgccttgcctctaggcgctttttgatgtggtgcatcttgcgactgatgagcgagcatcagagtcactgcaaccgcgatttttttcggaaggaccgcggagcggacctccgcatctacatgtacctgggctgacctcagctccacgcggcgtggcagttcttacataacgtgttctacagtatacatgtagttacctactgtgacgacagaagtgccgaccgagtctgtacgtgccactttgtcctgtcggttgtaagggtacaaactatagtgcgtcgtgaggatgtgttgaagatggcatgacgccttttttgctgttcgccatcgtgacaccgccaccctgtctccaacgggtcaaagtacactgccgttgaggtgtcgggctgaggttgttggaggcttccattgtttgcatcggtgttgtagggcatacatgtactaagttctgtattcgtaaggaaaacttggatcggtacgtcacggaagtcccttacattttttgatttttgctcaggtgattacatttcacgcggaatcgacatgtattatttcaaaacgaagagaaatcaggcttggggggatggcgggtctaaaccaaaagtgaccgcccccgcagttcgagtggatggaagctcctttctagaagcttccacaaccaccctacatctgctctatcctattatgtccttaacaatgcgaatgataccaacggtactgttacctctctaatctgatacactcaccccttcctcagatgagggctgcgtcgcttcgtcctcgcggctcttcaaggtaccagtcgtacttaagacagatggctacaaagccaactgaacttatccttaccaagtccgtacttaacggtcatttctcaattggacgtgcacggcgcaacagttggagctctcgggcgacttctgtggcggattcgtcctgcgctggctggtggtgtactcccccggtcggagctggataggtcctgccagcgccaccgtcatgacggtcgagtacggtggcctcggccacacacaggctggggcgtcgccttcttcggaggccgggtcgccctcgcgggcggctcttgaccaactcgctgccgctgctgagcgcgcaccccgcgcgtccctctcttcaccgcgcgatgcgtccgctgcactgctggcctcgctgcctccgatggatgactcccggggctcgtggagctattcctgctgctgggtgaggacggcgttccggtaggcttgcgcggcgccctctcgccagcggcagtgcgcgcgctcaatgaagatgaagcctaggagtcgacgcacaagttgaccgacagtgtcatccgcgaggatgacgtcgtgcggccgtgacaaacgactcggttccttgtagggcttcagcgagccagtgttgaagactggatgtagcttgttaccagcctggatgttgagctcgtagacatggttgtgggtcttccgcacgatcgtgtaaggtccaatccacttcggtccaaaattggtcgaattcggcaagccagagtgctttgggtcgaggttttgcgtgctcaagtacacgcggtcgccaacgtcaaagacttgttcttcacggttgcggttgtagacatcacgcattcgctcctacgcctgggtcaatgcttcgcaacaactcagcaagatggcggcttgacgctcatggaactccgctcctcgtcgactcttgggaatgctctccaacttctcggtagcaatcccagatcggcctcgaatggcgctagcttcgtgctggagttgaccgttgagttgacggcaaactcagcgttcgctagatgaagaccccaatcatcctgaagtggaccaacaaagcaacgaagatactcctccagcgttcgattcatacgtttcgtttgcccgtcgccttgagctcggtgagtcacggtcatgctcagcttcgtccagattgacttgaagacgtgttgccagaaggcggacacgaacttcctgtcgcggtcggagacaatgttcgtcggcatgctgtggagcttccaaatgttgtcgatgaggagtcgagccacgccttccgccgtcaccttcttcgtagttggcacaaaatggcaacgtttcgtcaaccgatcgacgacaacccagatggagtcgacgtctcgcttcattcgcgggagatccgtgatgaagtccatggagatcgacccccaccgttcatctgggatgcttagtggctcaagccaaccaggaggcttcgttaaccgaggcttgtttcttcgacagggcttgcagcctacgataaacttctggatggacttcagaatcttcgaccagtaccagcggcgcgctagtgtcaagtatgttcgctcagcatcaggatggccgccgtagttggtgtcatgacactcactgatgattgtctgccgcaactttacatcgttgggcacgacaacgcgcggagcatcgtctgcgggtgtttgataccagagcagtccattcgcttcggtgtagcatcggtacttcttctgctggttgcgttcacgctttggtttcgagctggagttgcgccgcttgatcgctgtgaaaatggcctggacctcgcgggctttctcatacgacttgttgatgcttgatatcaagtcggagtcgccagttacttcgctgatcgccagactgaaggatgtatcgtcgaagcttgtcacactcaagtcgtggaagaacttcgtctccggttccaggtctggtcttgggctcaaagcgtctgcaataccttcttcgctccagggagatacgagaacgtcggttgatactccgcaaggatatcataccagcgtgctagtcggcggttggccatcttctgtgtgaacaggccttcgagactcttgtgatcggtcttcataattggcggcttgtccaagcagtagatccgaaacgcggccagtgcatgaacgatagctaacaactcctgttgttgcgttgggtagttgagctccgcagacttcatcttccgactggtgtacgcaatgggacgctcgacaccatcgacgacttgaaacagcactccacctacggcgaacttgctcgcgtccgtccgcagatgcattggctggctgaagtccgggagatgcagcactggtgggttgcacaacctccgcttcaattccttaaagttcctcaactgcacgtcgctgaagtgaatcttcgcattgcgcttggtcttcttcttcaggagggcgaacatggttgccgtgagcgaagcgtattccgggcaaaagcgttgcacgtagccagtcggacccaggaagctgtgaagctcctcttgggtccgcggcacgggccagtctttgatggtttgcaccttgtcggggtccatccgaactccgttacgtcccacgaaatcaccaaggcatggaatcttgtcggcgcagaagacacacttggacagtttgacgtacagcttgttgtcgcgcaagatatccaacgtcttgcgcagcgcctccaaatggtcttcgatcttcggcgacttggtgaagatgtagatgtcatcgtagaacgatttcgtgttcttcaagtctcggaacagcttcgaagtcaaccggtgcattgttgctggcgcgttgcagactcccatcagaagtacaagatactcccacagtccgtttggcgcctggaaagctgtgaacttgatgtctccctcccgcatacgcacttggtaatacgcggacatcagatccatagtggagaaccagtacgctccagacatggcgtccaagatgccttccatcctcgtcatcgggatgctctggcgcacagtgtttgaattgagataccggtagtcgtgaacgattctacagccgactggtttccggacacagaatgtcggctctgcgtgaggactgatgcttggtcggatgagcttcttcttcaccatgtcttcgacccaacgcacgatctgacgctgatgctcaggagactgtcgccactgttgtcggtacatcgccagatttgaatccttcacatcgatccgatgctcaatgtcgcgcttctctggtaaaccttcgggtagctcaggacggaacacgttgtccttgtactccgttggaggtcgaaggctggattttcatggaactgtcccagtccgtttccagatagcgctgtgctttcgcactaccaacattgtcgggttggtctcgtcgttgcagtgagcgtgcaacttgcttgatcgtctcgttcgagagcaccaacataaagtcgggctcctcggccgacttggtcttgattctcaggaacttccgcagtttcttgcgggtgatgcacttggtctgcacaccactctcgtcgacaatacccatcgtgaacatcttctccacgacggtgtctttgcccctggtactgcttctttcgtcggcttctcgtgcagtactctcgcgctctgacatcgcaacgtcgtcttctccagctgaacactcgccagcttgcgggtcatctcctcgtcgtctggtgacaacggtcggggtctccttcagcactgcgtcgcgaacagcttcgcacgtggacttcacacccgtttccagcgcggcgcctcgacaggaatcgggtcttttcgccgaaaggcctttcgcctcgacagatctccgaagcccggaggcaatcaccggtccaccttcatcgatctgtccacaggtgtcacctgtctgctcccagcgcagagtcttctctctcgttccttcgatacgtagacctctccaatcaatctggggctgcttgtcctcgaagaagggtatcccgaggatgcagtcgaattcgtcgggtatcgcgtagacgacggcgacacactggtatgcctcgtccagacccgacacgtggatcttcaaaggcagaacttccagctccgtctccacgatttggttgtctccaagcttcacgtgaatgctcttgtcgctgaacttcgtcgttcgaagctggtgctccctgacccaacgctttgacacgtagatcgtggtggctccacagtccagcaacatgctgcgtgtagcgagacacttgtcactcacgctgatctcaccagtcacggagaacagcggacgtgacttgtagaccagagggttttcacacagaacgttaaggctgatattcccaatcgtaagtgttctggttacgctctcagccacgacaggaccctccttcattgacgtggttgcccgtttccctgtttctcctgctctttcttccagagaaaggagttggacttgatgtgaccaggcttcttgcagtggaagcaggtacgaccatcggcgcgtttgggctcagctttcggcttgaagcggcctttcccgcggaacggcttccccttgaagggtttaccttgggcgtgaggttgatcagccgacgagaacttcttgtcgcgcttgggttgacggtcgcgagcttcttcgacgaagtgagtcacctcgtacttgacagccaagtccatagcgtcgctcagggtctgggggttctcgagcttgacgtagctgcgcgtgcgaggcttgagaccgttcgggtagcacagcactgggtcgagtacgctcatgccctccactctgaagatgagagctgagtactcaccgttgtacgtctcaatgtctgctgcctgcttaagtcgctgaagcttctcgctcaggacagcctggtagttcgatgcctcgaagtgttggagcacatgctcacggaaaatcccccacgtgtgctcctcgcttcgagtcgtcgacgaccggtgcaggaaccagccggaggcaggcttctccatcgccgacctcgcgattcctggttgtcgggtgcttgcgtcttcgatcgggatgttgttgattcgacaggcgttctcgatctggaacagccattcgcgggcatactcccctcgcttgccggtgaacttcgcaggttgctcggcactcgcgtgcggtccgccatcgcttggttcagccgatcgatctcggcgcgtagttgggcgatggtgggcatgggctcctcgttgtcaggttgctgggaccaacaagtgctaccagtatttcaaaacgaagaggaagccaggcttggggggatggcgggtctaaaccaaaagtgaccgcccccgcagttcgagtggatggaagctcctttctagaagcttccagaaccaccctacatctgctctatcctattatgtccttaacaatgcgaatgataccaacggtactgatacctctctaatcggatacatgtattaccatgtacagtagttgaaagcggcaagataatcttcaggatttcagaatacaagtccgagccattgacagcagaaaactcgggagttctattagatctaacacgtccaaccgatttgttttacaccttctcaacttcaaaaccgaagtttccagtttcaaaatgtcaaaagttcaaacgaggatgtagtactcacatatatattggtgacccgggtggtgaacccggggggtttcgcagttcgaagctacttgaagcattagagctaatgaaggtgaatgtacgccggaatagttctagatgaggttcgcccagtagacagcctgtgttcacagaaaaataaaaccaaatcacctatggatactagataaacatagattaaaattgcgacgcttgcttacatcgtcggatatctcgtagccaagtaagtacttgaaagtaaaacaagcagcagactccgcgcgcacaatctcccgttaacattatcaaagttgtgttattcacaggcatctcctgcgccagcttcgcagccgcagcatctgccgggtatggtgatgtgcaggcggtagatattagaagtcttctttagctttgtacctgtgactagctgccatcgtgacgaacagcaataaatggacgaatttatagcgctggccccgccggtagtgaattttacagcttgaacacgctgcatctgcttcaaactcacaattcggggagtacatacctgataaggtgctttcggtctgttgcaagctcacggtcagaccgaacaaatatttttgtttggtggggtagtttggacccataaaatgctacaaaatgaaaccaaactcgatgagctcttgtcgagatcaagcctggattaatcattcaaaacctatcattcaaaaacaaaagatgccttaaaaaaccccaaagcagctggaggatctaaacgaaacgctggtgactaagaggtcgtaactttaccggtgctgcaagaaatcggtttaattagttttcacttgatacatgcatatgccaaagctctacatgccgctgtatattggttataaggagttttcagaaggaaccatcataaataccgatacaccgtattcagtgacaacatggtattctctcaatcggaaaatagttttgcttgtgcctaaaaagggttcggcaaataagaaaaagtagcaagcaatctaccttggcccgcccaactttaatatttttcgtggaagtcttgttgggtgctcaatccacaaagactcgttctaatgaatgtgcaggaattcaccctgtcgagatcctcttccaggataattttacatgaccaattaatcggcctcgtaggcaatcggctcatagaactatgcatgtggagtacgtttgcaatatcatcttctagtgtgtctgtgtggccagccctggccggtctcgtgtctgccgcagtgcatgttgtacgatccgaagcaaagctcgctctggtgcttagagttctagaagccggattcgagaagctgtacgaattcgtaggcaaaagccaggagcaggaacaagcactagtttagagttggagctaacatcagaattcattttactttcctttgcatactggtgaccacagtctgaaagaggaggtcatagaatacgatcggatcgatagccaatggggtcagtaaagtactacttcgaagtacaattttaagtgctctgaacatattacgtgtacaagtacgacgtagtgctgtgataatgtgcgtatagtttattggaagctgtggttgggctcacgatcagcatcatcaggacgtatgcccaacattgagctcaacgctgtagaatatagttgtcagtagctagctatacgatgcatgctactacgacgaacaaggtagcacgggctgcattcttgcattctttctccacaaaacgtgtattttgatggagtccactttctcgggttgcatacgttcttgcccttcagcgcggttagacacctggcgattctaacgtatatgtaaattttgaaaatactgtgacacggcataaaatacgcacaaaactatgaagtacaaaacagcacatcatattggcaggcgaatttcttgttgttcattgcacgactttgtctaccggacttcatcttgccggatatttcgtcgtagtctgtagaacccgtctgttcacgtctaaactggataacctggtttacatcaaaaacaaactacggctaagccgatcaggcaagttcccaatgaacaggcccagttttaaattaaagtttcgtttcttcgagcaagcccagaaatggaatgattcaagtaatcgtcgattcggaccactttagaaactttagggtcgagaactggttcaaaccatcttcgaggcctagcataaattggagatgcttttttttacaaataataccagtaaggcgatctattacgcataatttcataattttcttgagcaagtgtgaatgataatggtcaccaagtcaagcgtggctttctacgtgcgtggctactccgtttgaacttctgaaagtctttcgcccccagcttggcggaacggcacactgcacgagctccgcgactacgatgtgacttcaggcgcaactttattacagagctagcaggctccgatttcaacttataattccagctgtctgtttatctacgtgtcaatccgagcgctgaattgattgaggaagatccacggtttcatgtggcatgaatgtcgttcgatgtcatccgctaggcggggaacctaccaatgtagcgttaatgtcgttcgatgtcatccaaaaaccttccccaatcgacagttcttcgaactgcgaacaccctttcaactttaaaatggcaaaaagaaaattcaatacgtcgaccgatcctgacgccgaagacgaagatgactcgaagaacccctgacgcagagacgccgacgaatctaaaacccgcatccacttatcggtgcatcgactgttaacttttgctctggaggcggtgctcgcccttcaggccccgttcgtgggctgatcgagcacttgacgttgcttcgtgtcttctccctttccacttgtgtactcattctttgactgagaacttcgttcataaggcgaaatactttgatgctccgtcaaacgcggcttatgttgcttttacattgtagtctgcacgcagtcaaacaactaagcttgatcacatcagaatgaaggacaccgtattatatatattggactggtattcatgaattgccgtagatggcgcttatgctagcatcatgaccatccccaccgtcatcatcgaaacacatcggatggcaaccgttgccgcgctgcttgtcgtgctcgagctgccgtctctcaggttgttgctggtgacggagccgctgctacttgccgatgagtccgtcgatccgctggcgctgcatctttcgttgaaggggtcgatgatgtcggactgcagataaatcttggactccgggatcctgcagtcgccaagacccatcgctgccatgtctttcatcaacgttgcacaagctgagctcccgcagacggctttgagctgttcgggtgtgagatctgcgatcgttgacatgctgctgaagcccgcggccttcgaacatccagctacgttcttgtttgacgcgatgcccattagctccgaagtggagcactcgtcactcccattggtagctcctataagcgtcaagccgatcaccaccaggacgaagagtccaggcatcttgaacgcgtccgttgtcgagtacttggcgatttggtaagtgacggcgtgttgcgtgctcacgctaatcacagcctgaatgctctatccgcaccagcgggcagatagggtgtgcaactcgcatggaataattttcataagactccagaacatgtagggcaaacaaaccataggatgaatagccatggctgctcagctgatgagtgggaaggcgttccagcgcgatggttctgattcaatacaactcaatggcctgtacttaagtatttcagctttcagtggggtctggattacaccgtaaatcagcgcaccaaacttccattaactcgatcaaaagcacgcaaatgaccagtgtggcattcaatatatattacattaaaactcgggatgcggctcgctttagatggagaagacgatcgatgccagcatcagagtgaagatccaaccgacggcagccgttgaagcgccacttgtcgagcctgagctaccggcagctatttcgccgacaatacttgccgataaatccattgatccactgccgccgcagaccttcgaggatgtctgtgcccagcctaatctcggtgccctcgatgacgcagttcccgaagttcatagcccgcatgtcgtccgtaagcgccatgcacgcgctgctgtcgcaaactgccttgatctgctcttccgtaagtgcagaaatggcagcgaatccgccgaagcccacctccgaagtaggttcgagttgcctgcgatcgacaacagctcatcggtggcgcattgatttccattgacggagccggcgagcgccaaagtgatcaccacaagcgaagacagtgaagacatacttggcaagacttgggagtagtctgctgtatgacgggcgattcgaagaatgaagggcatcgatgtcggtgcgactgacagcaccgacgggcacctctcacgaggcgttcagcaaatacatccggcgtcagctttctcacaacccgtatgcccatttacccatcgttcatccggtgacttcacccaggtaacaaggcaatgctgactcaacacctcagcaacacgcatcctctgttgtcgaggaacgaaaatggtatgaatgaatacagtatagtggtctttccgacagagagactggcagaattgtgggcccaatcagttcgcgttttgaccaatcacggatcttcaacagtgtaactttggcaaataggagataataggggtaggtttccagttcggacactttccgacaaatatttgtcggaatccacacagtaatatgaatatgtattgtgctttgcacgaactttggcatgcgattaagggctctaaaccaacgagcaaatccttcccggtgatcatatctcgcagcctaactctaagttaaagttaagctaatcaaccgccagtaccaaacacaacccagagcaagagcggagcggttgccaccgaaagaataaatcggttgtcgctgcaagaaaacaaacggataaggtccccgatagaatggcgccaactccttgcataatagtaagcaccgatttcggcggggacgtattctttcgctctctttgtcgtggccttgcgcgttaaaccaagctcgaatttcagagcacggcatatagtagcagtagaaaatttcaactagaaatgtttggtagtgcaggaaacgctgactttaaagctgcttgctgctcctcgatataaaaacagggatgttcttcaatattgtagacgtagtttagtacgatatatcaccaacgcatgtcaatcatcgactagaaagcaatcagacaaagcgagcgagttagaattagaatgtcagggccgtagtattgtcggatttattccagccattcaacgaaagtgagcataactcaacgttaactcgttgtcttagcagctattctatcttaaatcgatgagttagcctcctaactcaatgatgggcaaatcaccgtgatttgctaaaacaacgaattacgtcgttgtttagacagaaagcatacaaggcacaatacatacaaatatcaagtagttaacatatttttaaaatattgtcatggctctgacaactaggtttattcctaaggtaggaaaccggtcggtggataggataaccagtacgtaggctttgcgtttgaccacacaactaaaagaaccaagcagtagcagacgaagcagcatgagcttagctgccttcgttcctacgaacacgcagaaggcgcggaatactgccgtcgccgcattcaagcggttgttggaggaggagaaggttagccttgagtttgtcgaggctagcattctcttggatacctccggcagacgattagcagcgacgatggaccgctttggcttctacctcgcaaccaacgaaggtaagaaaggtaagttagcccgcaacacggcaacagcgtatcatagaaatgccaagttgtggctatttgacaagtatccacacttgcgagtacctactgagttgattttgctaaagcaagggaagactttagataaacattgcatgaaacgcgaaaaaggtggcttgattaataaggctccaccttgtactaaggaggatttacagtctttagtccgttacgtgtacagcacagcacgcgtgcacgccgactaccaagacccagcactagcgtgctagatgtggcactgctttggccggtcttcggacctaggctacatccaaaaccagcacgtctctgtatcggcagacggcaccttctacctgcggctgctacgtgtcaagacatcagaagaacagggtcttaccttgatcccggacaagagcgacttcttgacgtgtcccttgcacgcttgcacgctctgaccatagcgctagcgacgcaggacgcgccatgcgcggcactcctgtcccagttgcccgatctcgtagcggaggtcgccgtgccacctgacgaaggtgtgccgctgctggagctgctggaacccgggcccgcttcgctcgacggcgctgtggtcccgacggagtcgtccctgccttcactgctcgcggccggcaacgtatcctctgttccaccgccgcaaacctgcccggacacacaagaaacatcaactccagccccaaccgaggcacgcaccagcgaggtcaagcgcggcgaagacagcgtgcaagcgtacgtgaacaggatgctcaagcgcgtcgccgagccggcaggagccacccctgacctgacctcgtactccttccggcgtggcggggcccagcatgcgaacggagatgaccgcctcaccgcccagtggatcttcgaacgcgatgcttgggatacgaccaagacgaacaaggccttcgcctacatcactaacacggcacgcgaggacaggaaggtggcccgggtcttgagtgggtgggcggcagacgacgttccagcggtcatcgacgtcgcgacgcgtgatcacgccagtcaaaaatgcctcggccgattgcagggcttcctgttcgattcctgtacaggtctcaagcaacaacgtctaaatgtaagcaccaaggtcctcagtgtcctcactgcgtacttggtccgttactacccgcagctcaaggagctctcacccgcggcccccattgtcacgcgcgtggaagagagtttgcgtggagcagacatcccgatcggcgacatgcttgcgtggtcagtcgcgctggacagcgaagccgctccgcctgctcaagaacaaaaccaaacacaagatgcaagccaacaccactgtccaagcatcgatcaccttctagctgtcattcatgagcttatcgcctcaagcaaggccctagctgcgcggttgacgattttcgaggcggctcagatgaaagctaaggagccgtgtagacccgctgaagaatcccaagcaaaggaatcgttagaccaagagcccaagccaaaacggaggaagaagcaagttacgcacctgtcggctgcatggtacgagtggtacacccatgttcctcgcgtctgggactccaaaagaagtccgaatcacgccacgtcgtcgccttcatgaagctgttcctcgaagactgatttacgcttgaccccacggttgaagactacaaggatcaggtcttggacgtcggccgccgtgctgaagatgccgtgttggaccttctaaagtcgcggaacatcaacgcgaagggcgctggcagtgttttgcgcgcgctgcgtcccctgcacaagtgcggcgtcttggacacacgcatcgcagcccacaagcgtctcctcgctacaggccgaattcaagaccctgctcctgcagactcacagggcatattagccttggctcgtcaagcatgaccggcatagtatcgggaattcccgaagtcctaaaccgccgagcgtacacagtcgagtaaacccgaaatcacgcaccgtcgagaatacccaaaatcccccacagtcgagtaaacccgaaactgctgtcaatgggagtaagcgacactcgcgagccaccgatgagcggcagctgtcaaaaagtagaatgactaaacagcatgtttctcaaccaatcatttatgggtcgtaattagtatattatgcattctgaccaataggatttaagacatttcatctaatgaaatgtaaggtacatgtcgagtttgtccgaaacgcgacacatcgattcttgccaagatggcgagctcagatcagcggacgaatgcggagaagatcgagatcctgctcgcatgcgagcgaaatggatgggacgctaccgaggggggtcgtcgtgtggctcggacaaccttgctgggttggatgactaacaagcacaagttattctcgtcctaggccgatccatccgcaaagcgggcagcgccaccaggcatggcccctccgacgcttaaatacgaggctggtattgttgagcggatcaaggcaaaagtggcaaacggccaggaggtgtgcagagatgatgttgtcgcggatgctgcgtcgacaatacctggctttgggaagcgcaaacccgcggctcagagttcgtggactacccggtttataggccgccacaatctaagcactttcatctcacgacgactccagaataccggcgcagcagcgccaaatgggaatgaaccccccaacaagggacacaagcgtcaactatcgactatagccgaaaaatcccagcctccagccaagtcgactttgcaagaaaaatcccagcctccagtcaagtcgactttgaccgaaccagcctccagccaagtcgactttggccgaaaaactcaagtcgcccgaggtcatatcactgttgaatgatgacagtgagaaggccagcgtcccatttgattttggagatgtgggggatatatcgcagtccgagattgtgtgtgaaacacaaaccccatgctttgttgcgggcaaaaccagcatgcgtttactggtgacagcggaagatgtccggacaattaaagaccaaaattggctgaacgatgtgattatgtcctattacatccgagtgcacctcccgcaacacggccgaacgtttgtcatggatgcaaacgtatttggacacatctacagcgagttcgttcaagtggagcgaaaacttggacttgcgcacgagcgctgttgcggtatcaccgcaacctttccatacgagaagtacgatcacgtgattttacctatatgcatgggcaatcactggacgtttgccattgtgcaaaaccctgtaggcactacgcagaatctgaggagatgtcttgtgcatgtagactcgaaaggaatctccagcatcgaagcgattaaaaaagttgtcggtggatatttcgacgcggagctgcgaactaaatatcctgacaacgcagcaccagcgttcgtcgtgagaggagtccgaacaagcccggcacagataaaccacgatgactgcggagtatttgtgctatacttcatcaagcgcacggtggaggcatttcaaaccgggaatacgcttctcttaagcgatatcgagaagatatgcacaagtccaaggtccacgcgcttcaacgcaaaactgatgcggaagcagatcatagaaagcctgacacaaacgcacgcgtaggctcactggaatacgggtctcggttaattcaatacatgtattacacgtatacatacaaaacgtcgctagtgctccaaaccttacagagaacagatatgagcacaggagctagagcaccgcgcacccaaatgcagcaccgatatatacgtagaaggcgctactcctggcacgaccacagcgcaacaatgcgcgggcaaaacaacttgaagcacaacgcagacgcacaatctgtgacgcagcagcaagacccttggcacagcacgacacgacgcaaacgcccatcgtgatcaataacaccgacccgaattgaacgggcatctcagggtgtaggccctgcgctcttccattgagctacggtgttgggagggggggcggccagttgtcttgtcttgggtgtagatgtgtgcgcggaggggtgcaggacacttgatcagtagctccaataaaaaggagaccgaacgctctcagccgcgtgtcggcgacgtacaatgcctagcagccaccaatttcggacaggaggcgagtatctactggctgtagagagaaccaatcaacgatcatcgttaaatacatgtcccctattggctaatagattggccaatggtatgcctcaaaggagttagctggcgtcggactgcttctaattgtgcccccctgtcctggagccggcctcattaatgaatttgccgggtccagtccacattgctcccggccgtaatgcatgaatacacaaaataccgtttttcttggcctacaggcctctagaagcgatttcctcgcggctgagagcctctcatgaaagctgactggaagcaccaaaaacgccccctagacctaatctaccgtaaatattgtgtaatttccgatcttacactatttacgatgatgctgttgcggagtagcagcactttgatccgttaacgaatcaaaggcgcgattattacatcgggctcttccacgagctccgatacttctccagcaggaagacttcttatctcagcagagtgcctgaatggcaggcactttgtcaaagttggaacgcttttgttgagaacttcaacaagaagcggactgcttaccgccagcgggttaagcacgcccgtgaacgcttcgagacattctcgacgcgcgggcggctggagcagctccacagatcctctgtggacgctggtattccatgcgctgtgcccgaaggccaacagtgcacgttgtgtcttccgggtgcggcgcgcttgagcgaccgcgacctaaacgggtacacgacgattcgtgtacctgcgagtctcaaggatccccgtaccaagttcttggcacgtgaggaacgcgacgatcgtgggacctcgggcgctgtaggtgaccacagcgctcgcactaccttcgcgtcggcagtgcgtggtgagcttcgtacgccctcaccatttccggaacgtcctgcagcaggacgtccatgtatcttggtggggcggaaaccctctccaacgaatacgataacgaaccggctgccggttcgttttcgggatactatggttcacaatacgctcaacaatccagcgtgttgagccgcgggcgtcgcggatcggaggcggcggtggtgggaacacgccccgggtatggtcaacttggggttaaccttggtccgacgctcgaggagcgggtcgctgctgtggagcagcatcagagccgggagtacgccgctctgaagcaggaggtggcgatcctgagggctcaagtcgctcaggcctcgcagaccgcgtcggacatctctgtcgacgtgggaggtcgtgtcgcacgcttggcccagcgcgttcacgcgctggagcagaggttcgctcccgctggggcttccgcttcgggccagccgagctaggtggctcgtgctgccggtatggcttcagccgcccgacgtaaaaggtcggatggaggcgcatgctagatggaatatctcgttgccgtgccgtgccaacaccgtgaacggcccgatgaagcgcggagcgagcttgctcgccccgaagtcggaaactgcatgtttaggcaggttttgagttgctaacaaaaccaatgaacccttcttgaattcattagtgttgcccctaccaacattgtctgcgttcagcttctgtcggtcgacagaagctgcgatagcgtcttgtacaaaccgaatgacggcttgtctgcgctgcacgaagttgattgcgtccgagctgaactcgttcagctcgtttctagcagaaggcccggcctctgcgttcgtcttcgcggtgtctgtgccctgcacagacccgttcttcttcttcttcttcttcttcttgctcttgtcgacatctgtgccctgcacagacgcgtgcttcttcttcttcttgcgcgtagtcgcggctgacactgtgcaagtgtcagcggcattctgcggctgctgcgttgcagtcgtagatcctcccccacttaaggaaggagccaccatcctgagtagactcgggaggcgtgggtgcctgatggcattcacgtagaacggtgtatgcccggtcgaggcatgtaccgagttgttgatggcaaactctgccatcggcaggcactcgctccagtgttggaacgagtgagcgtagctcttaagcacgtctacgagcacgcggttcacgcgctcggtctgcccgtccgtctgcggatgatccgcagtcgacatcgaaagttgactccaagaagtgtaaacacttcttgccaaaggtgtgcagtgaagcgcgggtctcgatccgacacaatatcgatcggcatgccatggtgtttgaacaccatgtcaacgaacagacgcgccgtctgcttcgcagtcacttcagcgggtaccgcagcaagatgtaccatcttgctcaagcggtcaacaaagaccacaacgcccgtgttcccctggctgtcggggggaagaccgagcacgaagtccaaagacatggactgccaacactcccgtggagttggtagtgactgcaagggagcctgcgcgaaaggcgcaggcttcatacgttgacaaacctcgcaagcacggacgtacttgcgcacccatttatactggtgggcccagtagaagtctcgcgtgagaaaaaggtatgtcttctcacggcccggatgccccgcagtcggtgcatcgtgatactcgtacatgatcctgagtcgcaggtcatggtcagtggccacgacaacgcggtccgagttgtcgtcgactgcactgtagagtaataacccgtcgtgcacccgataacggtgtgcacgagcacgaagatgcttcggcagcttctgacgagctttgtcagaaggcgctgagccgtaggccagcaagagcttcgcatccgcgtcgtgcgcgtacgcgaccttcacgtcgtccaacagtgacgacgttggggtgctcgatcgcatggcgtcaatggcattgacgtcggcatcagtcgtggcgtagtcaggtcgacgcgagagcgcgtcggccaccacattgagtcttccgggtttgtactcaacccggaagttacactctgcgaagaatgagagcaatctcgccatccgttgcgagatgtgcggcgacttcacagccgtccgcaacgacgcgtggtctgtgtagaccaggaacggtttgcttccgagtagatacactcggaacttcgcgagggcgtacttcatggcaaggagttccttgtcatgtaccgggtagttgcgctcagctggcttcagctgacgcgattagtagtagacgacacgatcacggccctcgtgatcgtgctgcatcaacgcacatccgattgcgaagtcggatgcgtcacacacaacgtggaacgggcgatcttggtcggccaccgccaagatcggcgcctcagtcaagccccgcttgactgcatcgaaggcctgctgacactcagcagtccaaacccactcggcgtccttcttcaggagctgtgacagcgggcgtatcatgcccgcgtagtccttcacgtacttgcacaagtacgtgaccaagccaagaaactgccgcagttccttgacgttcgacggcgtcggccactcattgatcactctgaccttctcagggtcagggcggacaccgttcttcccaacgagacacccgagcacgggtatctcgctcgcccggaagatgcacttcttcaggttcgcatagagcttgtgcttgcgcatgagcgcaagcagcttccggaaatgcaccttgtgcatcccgacgtcgctcatcccgtccgcagcccggctgtggacgaacacatcgtcgaagtagctcggtgcgaagtcgcgcaccgagcgcaaaaacgagtgtgtcacgcacctgttgaaggtcgcaggggcgttcttcagaccctgcggcatcactagccactcccagagcatggccgctcggcatgctcactgccgtgagagggatatcgctctcacgcatgaggatctgatagaacccatcgcgcagatcaagagcactgtagatagtgctcctggccatcgaatcgatgataacatcttgtcgcggtatcggtgtctgcgccggtatcgtcgcatcgttcagcttgttatacgcatgaacgatgcgccaaccgccctgtggcttcttgacacagaacgtcggagcactgtgcggggatttcgattcccgcacttgtccagctttgcgacgactttcaaagaagtcgtcgatcgctttgacttgctctcgcggcagtggccactgccgcgtgacacagtacttcgtgcccggcacgagattaatctcgtgctggattcccttgtcctgcggaagctccgcaggaatctcttccggaagtacgtccgcgtactcccgtaagatctcgtagtagggactcgttttcaacgagccccagctctgctctttaaagcgctccttcttcgtcttcgcactgagagtgtcctcgctctcagtggtggtctccatgaagaactgcctcagttcttctcgctcttcgttctcccggcgtctgagagaatgcatatttgctcgatgcgtccatcgtgcaagtcacgcgcgaagcgcttccagctcatgactggaagcgaagtcaactccgacgcttgcgtcggagggttagcgagggtcatctccctgtaccggaacccggcacaggtacgcgtcaagacgttcaacgtctcaacgtccggcttctcagcctccgtctgcccggcagacattccttgtagcgtctcggccccaggccgagacttgcgcagcgaccttcgcatgcgccgtcttcttgttttgcggagcccggctccgcttggttcttgacctcgtccaggcccagccatggacgagtgttcttctttagtaccgccggcgggttcatcccgcgggcgagcgacttcaagcccggcttggtcgcccggctcttcgtcgtgtagcccggctgcacgacagcatgcaagtttttccggtgcggaacgtttgcaaccgtccgcaccgcctgcagcgtcggctacacgccatcttcacctcgacgcctgttattggcggagccctccattacggagggtgcgtcggctccccgagccgacgaatcaaattcacccaagccatcgactcccggagtcgacggcgttacgtcaccttggctcttagttttggccagacctgatccaatcagattcgcgttagcctccacggctgaggcgtgtgactcgtctgcgtcatccgtgccccttgaggtcggagattcttcctgattcgctgaaaagcgggtgtcgatctccgagatcaacacattttctccttcagccgtcggcggcgacgccgacgctggctgttcttgcgcgcgtgctcgcgcgcgcccagggcgctccaggacagcggcattaggcgccgtctcgagtggtgagtcgcgcgtacctgtcggtgcgtgcgtagcggcaacagggccatcgctcactgttccgctgtcgcgaccgaagcgcacgagagtgcgcttctcccaatcgatgaccggatcatgtcgtgcaagccacggcatgcccaatacaatgtcagacttatcgttaaaatccaggacgataaaggtctcgacaaacttttgacttcatacgtgaagcgcacgcgtatcatgcgcttctcggacttcacgacggcacccgttgccagtcgtacttccaacatacttcgaggtatctttaaatcctcgaagtcaagccttgatagacttcgcagtcgaacaaagttcttcgacgcgccagaatctaccaaagcacggaaagagccgcttgctctcatcgagttcacattcaggatgacaaggtcaggcttgtcatcttggttcttgcagtgaggatgaacctcactgggggctgccgccctcagtgtcgcgtgtccaaggtcgacacgcggaactgcattaccagtagggcgccccgcgcctactggcgtccagcgttttttgtttggttgcgacggtgcccggcaccgccgcgatagccaccctgctggtgcacgggggccgtgcactcccgagcaaagtgaccgattctaccgcatcggtagcattgcacattgtttccttgcgactgctggggcccagcagttgcagcactcgagaggtccatgggttctgggcctcccgtcctcactaccgggcgtggctgtggcctcggcacatgtgcatgcagcttagcctgccgcaggctaaactcctcctgtattgcaagagttatagcagcttcgagagtactcgggtactcacggaagagataggtcttcacaggcccatctctcagccccttcatgaacgtgacgaccttggtcgcctcgttgatcggattggtcacgatgttcgagaccaagcaccgtgctctctgagcgtaagcatggacatcatgcttgccctgctgcaggtcgaggaactccgccctcgaccggaactcgttttgcgggggctcaaacgcttgtctgagctcctccttgaaaccctcgtacgtgctaaagcacgtaggttccgagagtcggcgtccatacgcccaacttctagcacgtccgccaagacatgacatggcgaacgcgaccttcgacaacgggttgacgatgcgtcgagccgcaatggcagtgtcgagttcgacaagccaacggaggagaggctcgccctctcttccaacgtaattgctcacgctgagcttcagcgattgcgcgcgcggtgtcgtccccgacgacaccgtggtagacgaagtagcatctcgctgctccctcatgatgaatcccagagcaacaccatgttgctctgtcagcgttagcgtacgcagcatcgtagctacagccgcctcaccaatgactgttgacagtcgttggagaccttcccactctgggtccgacaggtggggacagtcagcgcgtgcaatgtgagttgcaggcatagtggatctctccatggacacctccgtattcatgggaaggttctcagctccgcgttcgtgcggtgacgtacgaactcaggtagtcggtcgttggacggactacaaagtgctaccaggtgtaatgggcctactttggctcactactttaccttacacgtgtgcgcgtgtatgtgaggaagcgtagcttagtttaacgtagagttagttatactcgggcctccgagtatagattaatctaaataaacgatccaaataatgttttgggttaaaatgagaacggctatttgtgttttatgtttctgacttcctctaaatgtaatatcctaaacttggaatctgccaacggctggttggcagaattccaatgctatgcatgtcgctcattggctaaaagatgttgctttcagccaataggaatcctaagtctctatggaccacccgtcgtggtgatcctaaatgtatgtagcctttggtgtgtctacaccaaggtcgagaaagtctttcgaacctctaagagacgtcgtatctgttagagttacaagtgactgtagccacttgtgcgtgtaaccctgttacatcacttgttgttgttgcatactgtagaagtagttgggggacatcctcactcatcgtcttcagcggttcccagtagtcctcgattgtctcgagacccagccacttcaccttcacctcgtatgcgttcatgtctgtgttcatcctgtgctccacaatcgcttccacagcgagcaccgttccttgtgaagcgatgtggtcgatgagctcctcagtgatattgagcgagtgatcagcgtacatctttagccgagatgggtgcacgtccatcgtgctaccgttgatcagatgctccaccgtgaagtagtagtcagcgctgccaaccacacggtacgggccgacccacatcacacgcagctagtttgcatgcaacttttcgtcgacacgtgacctcaacacgtagtcgccgaccgaaaagttcactgcttgctcgtagtgtggtcgccctcggtacctccgggcttggcgctctcgctcagctttcacagctttgtgcatgtcccggatgtcttctcgcagcttcgtgagctgctgctccgtgctagggcggagctggtccaatgtagccactcggcgacgccccttctcccccggaaagaaaactgtgtccaatatgctcgggcatggccatccagtgaacagctcgattggggcacggttggagagagacggtactggcgagtggttaatgctcgactgcactagtggtagcaggtagggccagccgtggatgcttactttgaactccagtgccaaagcttccagcacttgcaaaatatctcggttcattcactccacagagccattcttccaaggcgagtatgcgaggataaattcttgacgacccttgagtctccgactgagctcagcaaccaccttgcttttaaacggtgatcccgctcacccatacagtagccactgtaccaatccaggatcgcactcgcagccgtcgctcacccatacagtagccactgtaccaatccaggatcgcactcgcagccgtcgctcacccatacagtagccactccgaagcgactgtaccaatccaggatcgcactcacagccacctcctaagtcgggctatcacaagccactagctcgacgaaatgcgttgcctcgtccttaagaactagagcgtagcgagatgtaccaaaagattcaccgagtgtcaaaacgtcccagtgcagagtctcattacgttcaaacgtgtgatgggtctcgctgaatgaccgaggaataataaccccacccttcacatgcaagcaaagcaagcacttcgagcagaaatcgcgcacaatcccgttgagaccagtaatgtagaacaaccggcgaatgtgattctgcatcacatgcataccgcggtgcccgttgcgaccgcaatgtgcaataataagcagtctgcgagtcaggtctgtagccccactcggtatccaaatcactccactaatacgccacaaatcatcatcatcgagggttgccctcgacggagccatgtgtcgggcttgctcgcaaccaatctcctcaatggtgggccacacgaaattgtctgcgtctagaggacgcagcggagtcatagtactgtcttctttatcgccactggccgctgcaggtgccctctttgatcgtgtgaaacgcttcaccgcgttgaaacgtgctgccggcagtgctcggccacctcacctcgatatcagatccgcccacgttgtggaccccttcaatatgctcaatggtatagcggtacgccaagagcttcgtcgaccagcgcagtaattttcccctcacgtgctttttgagccttttcccagggcagaacaggtaaatgatgttccggtagtcatagtatagtcgaaagccctgcggtcgtaaaagcaggtactccaacttcacacatgcctgcacaatcgggaacgattctttttcgatcacgctccaattgagcgccgacccagtaaagcttcctcccatgcagatcaggagttcatgcatttgctcgtgaattggtacgtccggttgccactgactcacttgcgtgactaccagtccccaaccagaatctgacgcgtctgacagcacacatagctgctttgcagggtcaggaaaagccagcatcgctgaattaccaagcaaattcttcacttcggaatatgctctcagttcgtcatcagtgagctccagtcttatccccgccgcggccatctttgtctttttcgtgcggctcagagcgcgatctaggcactcctgcagaggtctgaccactctcgagtagactaccagagttgatctcatccaattgcttgcacacaaaaactgctgcaactcagcggcagttgtcggcactggtaacgcttggatgcgtttggggccatgaccgatgccagccttgataatgatccttccacaccatcgcacttcagtcaggaataaggcgctcttcttaggattgaggatcaacccgtattcatccaggcgtgtcaatgttgcctcaattgcttccagcagctcttccgccgtgtccgcaaaaacgagcaggtcgtcaatccagactatgacagacgtgcccaccaaatcgcccaacaccatctcaatcgttgactgaaaatgcagcgctgtgtctgtgctcccttgcggcacacgtgtcggagtaaaaaagatcttgtcggtcatgtaagacaggaactcttgacagctatcatcgagcggaagctgccaaaagcctttgaggaagccaaacacggcgtagaacatcttgcccttgcagtgctctaatgcaacctccaaacttggcattactcctgcgattggttccgtcacagcattcagaggtcggtagtcattggtctgtctgaattcatctgtgccaggttttctcacaagtaacgcgggacagcaccagcgactcgctctgttttcgtacacccagccaagagccactagcttctgattgaactcagcgatgaacgtcgatttttcagggctgtactagcgaaccttgcacctgtaaggagtggcgttcggctgcaacctaatcttcagcggaggaacacgcgctggcgggtcatcccccaacttcagtctccatccgccgtaccttcgaataattgtatacagtcgatcagtcgtgtatttgtcgatcacacctcgatccacggcgtcacgaaccagagcatccacaacattcgtcacaatctctccaaccgtaggtttgcatgctggtagtccgtcgggatcatcgatcaagtcgtcgtcatcgatctcccgacacgtgtcgtgtaggaaagcacgagtttacgagtcctcgccctatcaaccgaagtcgctaggacgagccctaccaacaacacacgctgtctccgaagagtcggcgatagattgtcgggataataaacctgaagaccaggtacgatcccttatacgggctggaatgttcctccctgtgtgttgcgggtcaggtaggtttactcttcgttaaaatataagagcaccctcagccacgagctacggctaggatgcaatgtgtaatacgtgctttcgcactaaacctctgtggtccctcagaaaggaagggtaccaggccaatcgaagcctcttacaggggcgccggggcgaagcctcggctagaagtcaaatacactggggggtccttgcctcacacccagtcaaacgtacaactgtacacagaggtctttaatacctcccaacactcggccacctacccactcttggccttaccaggatgaacactcggtcaatgcaccttatgctcaccggcaggcatacccgtgcagccgagtgtatccagaccctacgctaagcttagcgacttaccgtagacggacttgacccttgtgtggcttggggggaaaattctgctctgtttaatgatgagaggctgtcaggcctctcctatagctaatccctatggtctatacaaatatcaagtgtggaccgagctttcgagctgatcctacaatcggacgaaacttcgtcctaaatacgaactcctactgggcataaagcgtacccactatgaaactttggaggcctcggcaggcggtttattttgacccgccgagaccctcctgtcactccgtagtctctattaatcgtcagggcactaaagcgcggggaatgtgaccgaccaatcagagccctcggtcaggcattactcgctagctcaaggcagttagacctcgaccggaactcgcccggccgcagtcatgtcccgatctcacagcggcccccaactcgacccgagccgtcccaagtggtgcgtgtcgtgttgccttcgtgcctctctgcgctccgacgccatgcagccctccggcggtcctggcagcgcgccgcccttcaccttcccggacctcggtccagtcgtccaggtgaggcttcgtgcgaggtgcttaaggctgtgcttgatctcttcatcgcgtttaaccgtcttcaacttgctgcatcttgctgcaggacactcaattgcgtggccccacggggcaggtcatcgactcgtcggtgccggcctcggaggcctcggcggcgccaactaccccctctgcgtcagcaagcggggcgccccgacggccccaggcttcggctgcagttcctgtagcttcagcgccatcgtctggtgctggtggcagcgccggagcagctccgtcaccaactcccgcctctgcaggagcaccgggggtggcgggcagtctccaggccgcaccttcggtcgtcgcgccccatgcttcggctgcaagcactggagagacttcggcttcgagtgcagcggctccgacgttgccaactcccgctttgccgtccgctagtgggaccctgcgtgtactcagctggtcctcaggtcctcgcccgactccagtcctctgcacgagccttcgtcaaatgctgcgcacttctgccgcacgggtgacccgctgcctgctactgcgcacgtggcctcgggacttcctccgcgttcttccgcacagtggtatgctgtcgaagacatcgtcgcgacagctattacggtcaacccagtgctggaccctcgccgtgttacggccccgtgggtgcgtgagttcacgaacttctacgggcctcctttcggtctgcaggaggacgggcagccaggtgaagacgaagtctcggaagaggaggaggtcgaggagctgatcgaagagatcgagtctccggttgctgaagggtcttcggaagaggctcaggacgagtctcgccgcgccgtggatgctcaagagacttcggacgaagctacacatgcgctaggggctcaagatgcagcaacggcaacgcaggactcggttcaagatcgcatcgcggcttcggaggccccttttgaggaggccccagtcagcgagactccagctgacgcgccacgttcgcctccaagtgctgctgatcaagctgccacgcaagccgaagcttctccgactgcgcgtctccgcgttttggccaaggttgcctcgtcttcggacgcctaagcttcgttccagttctccatcgttccttcatgtctaggtcgagctagatcagggtattcagacagttcgttcgtagtataactagctcgcccatgcaattcagtagtcgtttgtccttcttcagctgttctccatagtttctccagtcgtgatctccacttcgtaaagtcttgtccacttcaacatacaaatatgcaatcatctttccgcagtaacatgtttcgtcttctggggcaggctgcgtagccctgccggcagttcatcatggtgagagggatgcaactagtcctcgtcagcgacttggactatttgcaaccttcggtcacgtcgtttctcgcgtagatagtcatacagcagtccgccacaatacagattcgacgcgggctcccacgatggttcgtcatagccgacccacttcaccttgaactctcggacggcccgctcagtgctcatcgagaggggaattcggtcatccaagatggcttcaacctcatactcgcctaccaggtggtcgggttcccaactatcctccgggagtaactcctcgtcgaaatctagtcgcgtctcctaggttacttcagcagccagtcgagccttcggccgatcgccaaattcgttcaccgccttcaaccgggacacatgcactaccgggtagaaccggtaaccactcttgtcaggcaaatccaactcgtacgcatactcgtcaaccttctgcttgatgcggaagggaccatgccatcgatgagccaacttcttggtcaaccctggcttgacgcgttccatgtaacgccacgtacgatcaccaggctggaagagagacttcggtgcggggtctggtgtgtcaccctcaccctctgcacctgtcggatcatcttccgaggtttcgccagtcgcggaaggtggaagcgcagcacgttctgctcggctcaaagcctcgttatgcttttgtgctcgccgagccttctcgactgcttggtactccttagccatttccaaggccacctcctgttgccggttgacttctcggcgccacgctaaagcatcggactgtcgcccgaagcctcgcttcagcgaggaggacattgcccggcgggtcgaccatgcgtcccgtccgtgcaccaagtaaaagggcgtgtccttcctcgtgccgtcctgcgagttgttaatcgcaaagatcaacttctccacaatctcgtcccaatcttgttgtagcgggtcttccgcgtacactcgcaccgattgcattacggtcttgaccgaacgttcctgctggccgttagcctgcggccgatagctcgacgtagccctagatctcgactgcatcatctcggcgaaggtttggaagacctcgctcatgaagggcgggtctcggtcacgcctgatcagagacggcgctccgaaccttcggtacacgcactcttcgaatgcttgtgctacacagagtgcagatgtgtccgccatcgccttgcccatgacgaatccagtgaacgcacactgaaacagtagcagtgcggtattgccccgccgagtcttcggtaggggtatcacaaaatccatcgagacaaattgtagcggtagctcggccaggatgttgcctggggagtacccacgcagctgcgggcgactcttgcttgagctacagtccggacacgagcgtacgtgtttctccacatcagcgaataagccaatccaatagtagtcagccttgactcggtagtaggttcggacgataccttggtgaccgtcctccaacgagtcatgacagttctgtaggatctcctgaaccatcgttgttggcaccactagacgtagtgtcgtctcctcggctcggtcgcgaccccaccgacggttcgcaccgaggaaatacagcaagccatcttcgcttaacacgaactcgtcagccatcttccaggcttcgcgtgcagctttgtaggcaagcttcgtttcgtctacctttagcaccatcttgaggttcgaccaccggagctcctcatcctgggctgtgccaatgcgcctgcgccgttcttcgtgcacaacttgtgggtcgatgtcgtcagtactcgattcatggaccactgttgcatcaggtctcggctggtccggaagttcgttagactcttcgttgctgacggcattagcttcgtctcctttggttccctcttctggttcatcacccgaagtttcatcggcaaagcgtacttgtttcgcacgcgcgcgggcttgttgcctcgttaccgcggctacatgtccagtgtcccgtacaaaatcgaaaaaaatcttattacggtcactgtcacgcgtatccatcacacgtatcaagtacacgtgacttgttacgacttctccagaaccttcaaaggcttcggctgacggttcatagagcacttctcggatccgattcaattccatcaactctcgtttttggtcttcgctgttcaccgtcatcgacaccttcttctccaagttttcgctcgccaaagagtctgcagctgcattgaactctcggatagcatgtatgtactttacggaccgaattctcgcggtcggttccttgtgcttgttcagttgtgccatcagcgactccttatggcaagcgatcacccctagggattgctggatttcgagtctcgagtccccgacgatgactaagtcctcggccccatgttctagggcggcagagaccccgttgttcattccggtgtactcagcgaggtttagagtcgtggtctcgggatacgcactcgcagcgatcactacacaccattcaggaagtcgccatagtatccaggcgcaactgccgtagccaccatgcttctcgatctttgccgagccaacaaacgaaagtacgtagccactgtaggtacgtggcaaccgtgcataaagcaaatgcggatccatccgaacactcggcgagcctttggctcgaggggcacaggtgccaacgagtcttcgaggtcaacgaagcttgtgatcgtcgactgcaaaagctgtgcgaaagcgcaatccttttccttgactcggtgcactactagactccacggatacagtaagacggcaaattgtgttgcgcgtccgaagagtgtcttcgacttgtggacccagtcgagcgtcgaaaaccgcgtgtagacatgtatggtccgaccggccagctgggtgtaacacaccttcaacagctgcagcaaagccagtacttccttttccgccgggtggtagttcatctcggcgtccttgagcactcggccgcagaaacgcaccgggtgcatcaggccatcgtgctcctgcatgagcgtggtgctcacggcccattcatttggaaacagcatcacatggacctctcggtcacggtcgaagtgtcggaggacaggtgcctcaccgacctttcgttgcaatgccgcgaagcttcgcttggctgcagagaggtcaccccctggtgcgaagtcttcgtctcgcagctggtagagcgcggcaccgtagacagcaaagtcctgtatgaagcggctgtagtagttcagagcgccaagtaaagcttgcactcccctcttggaccttgggaaggacagctcggtgatagccttcaacttcttagggtccgctctaataccactccgggacacttcgtgagacaggaagtccaccttgggctgcacaaaaatgctcttggtgaagctcacgctgatccgacattcctcgatccgggcgaggagtcgatcgggcgtcgctagacatgcatcgaaagactcgccaccaaagcaaatatcgtcaacgaacgaacgccgttcgaaacccggcaccaacgaagactcgtcgggctctccattcgcaaacatgtccgcaataggactgttgactaattccgagaccgagctttcgctcgatccgagtccaagtcccgcttcaaacttcgtaggcgactggtccgggtcggacgactcttcatgtgactgttcagtcgaggcgttggcgagttcacggtcgcgtgcttcagcttctgccatcagacgcgcgtaatgcttccatccaccctttagttgaacaaagccccacagagcattgtcgagcattcgttgatagatcataggtgcatttttaagcccaaagggcattctgagccactcgaaaggacctagtgcacacacaaacgcagagatctgacgagccctctgtgtcatcatgatcgcccagaatccactcgccgcatcaagcgagcagtaccacagatacttctccaggtctgtgagcagatcatccacaaggggcattgcatactccatgatagcggtgactgtgttcgccatcttgtaatcaatgcacagtctgatatctacgccattcttcttcagcacaatcacgatcggtgacgaccatgggctgttggagaacgcgatcagacctgccttgagcaaacctcgcaagagctcgtaaaggttcttgaggtgtcggaggggaattctccgggctcgttgcttgataggcgcatggccctgcacatcgatgtcgcacactacaccgtacgcaggcggtggtagagcattgccactagatattatgatcttctcatgtttcttcagaaccttcactaagcgatcctgccgtccactactcagttccgggtgccggacattctcagccgagtagtccagttccgtgaccgaggattctgtaaggtcgggcaggaaagctagttcatgagcgtaatcttccaagttgatctcattgggcaagtgttcggcgcgcgtacgttcctccagctgcttggcgtcgctcgcgctcattgcagcagcaacgtgagctccgtcctcaccagagctgctaacgccactgtagccaccatcgctccgatcactctcagagtatgggtaatcactggcgtcatggcgtcactctcgctgtcgctgtacgaggtccgacgtggcgacgagcgctcggctctaccacccttggtaccgcggacttgcagttcagcgaccaagtctgacagcgaagcttcagctagcgagatgcgcggaacatggcgcgagtcatcgcggcggcgagagtcttcgcggcgacgttcgtaacgacggtcgcggtcgcgacggtaactgtcacgtgaagcttcgtggcgacggtcatcacgacgaagcagttggtctcgactgcgcgagtggtgagacgaggtctcgcgcgactgcccacgctcttcagacttcaagatgtcgttgatcatgtcctcgagttcgtgaatgtccttcactcggacgtggcaaagccggcattcgaggcttcggccaccgcacgtctcgaggaaccgctgcacatggtccttcgcatcgcggccaccactctcgaacagaagggcaacattacgagcataaccgttcagtcggttgaggtagtcacaaaggtgttccgaggactcgcgcttcgcagagtagtagcgagccttcgcaggctggctaaactgcgagcagaaatacttggtaaacgcatcgctcagtcgcttccactgacgcttagtcctcttcgggagttgacggtaccagtgaagggcaccgtcccgaaggctcagctcgaaagccatgcaccactcgtttggcggagtttgcgttcccttcatctcatagacgaaagctcggagccactgcatagagttttcactccgattgcgggcccctgagaaattcttgatctgcgcaagcggccggtgtgtggcgatctcgagctgaggagtcgaactcagtcgctccatttcgctcacttcgggcacttgatgggccaactcatcgctcgggctgtcaaacccatcttcatagtcgatgttgtcattgtcgtcctcgtcggtcgaggagtcatcgcgcggtgtaaaccggcggcttgagcgtcgcgtggagctacgttgcgtgctctgcttgcgtcgcgaaccttcggactcacgcgcaatacggtcggctcgactagccgacttaggagtcaccatgtgcgagtcttggaagtacggcgaaccttcggccttggcggagaacactccgtccgtcacttgacttaggtttgaccactcggcagacttcttgggtgtctgcggcagtgggatcttcgaaggatcagcttgctccctcgcggggcgagcactcggggggcgtcccagagtcaggtccgactccccgaagctcaggcgaagcttcctcttccacttatagctccttgtcagcgagtcccggcgtccaactcttgatcgagacttcgaatggacgagtccttggctcgcagcccatcgctcgtaggagggacaccgtgtcctcggccacctgagtaaccgaggtcgatgttgcaactccaccttcagctcagcccaagtcgcttgtcgcgtcatctcgaaattgaactgccatatccactcgctcgactccaccatctgctcgagcattctgccgagcaccttgttcgcagctcgagcgctgctgttcatagcgggccgacttccgcgggattcttgaggacctttagtaacatgcaccagagccctcgaagccgaggtctcggtgccatcctcaaagtcgtcatccgcatgatcgggtttcgccacttcatcaaattccgcgacgaggttccgggccaaggagcgcgagcctccgctacgtcccgcggacagcattgcgtcgtcgctggagtcatctcctccaggtcatcatagtccatcatcatgtcatccttggcgtccgaatcttcgtcgaccgactcttcgaaactggccgacctttcggagatcgtcgacaacggagacgttaagtcactcgcgatcgttgacgaaccttcggccgatcctcgtcccgacttcaccggcgtagctggtaccgctgacttggatccattcgccatcttgttcttgttcttgtttcttcttctcttcttcacttcttcttctctcctcaatgctcgttgggccaaacctacacagaccacaacacacaatcggtcacaccagtcccgggtcgcggcaccagttgtcgtgtaggaaaacacgagtttacgagtcctcgccctatcaaccaaagtctctaggacgagccctaccaacaacacacgctgtctccgaagagtcggcgatagattgtcgggataataaacctgaagaccaggtacgatcccttatacgggctggaatgttcctccctgtgtgttgcgggtcaggtaggtttactcttcgttaaaatataagagcaccctcagccacgagctacggctaggatgcaatgtgtaatacgtgctttcgcactaaacctctgtggtccctcagaaaggaagggtaccaggccaatcgaagcctcttacaggggcgccggggcgaagcctcggctagaagtcaaatacactggggggtccttgcctcacacccagtcaaacgtacaactgtacacagaggtctctaatacctcccaacactcggccacctacccactcttggccttaccaggatgaacactcggtcaatgcaccttatgctcaccggcaggcatacccgtgcagccgagtgtatccagaccctacgctaagcttagcgacttaccgtagacggacttgacccttgtgtggcttggggggaaaattctgctctgtttaatgatgagaggctgtcaggcctctcctatagctaatccctatggtctatacaaatatcaagtgtggaccgagctttcgagctgatcatacaatcggacgaaacttcgtcctaaatacgaactcctactgggcataaagcgtacccactatgaaactttggaggcctcggcaggcggtttattttgacccgccgagaccctccaccaatggatgatgcgcatctactgcatccctcagcgctgcaggctcgagatattgtttcaacaatcggcacttttctttcattcccgtcgtagttgcaaaagtgtttgccagcccatgctgcaagatgatttcgtcacaaagcatgaagtagttaatcactctcgctttcacatcacgctcacgtaggtccatcttcaacttgttgccaaaaatctagtcaacgtccatcacagcatcattcatgacatttccgacaatcttgtcgagctcagcaacaatctgctcgtcagtgatcgcttccacggtcgtattccactcgaacttgcagagagtctccaacaagttcctgttgaaggcgttcttgccacttctcaacgctttacccttgtcttatcccgtagccgcacggcgagcttcaacggcaccttcatactcacttctctctcgcgtccacttgaccgaagccgggtgcgagatgtccgtgacgtagggtgacatgggagaagacgatatcaccggaattgcagccgcgaagctgctcgtcgaagtgcccgttctcgagttgcctcatcagtcgattggttctccatggtaccgctggagtccacctggccaccttgagtcgatcgtccactgctcgttctcatcgcgtacacgatactaaagttaactttgtgacgtggtcacgatacttgggagctgggactcccactaagccaacgtgtacttatcagcgtagatgcaaaatgcaaagtaaactaccttagctagtttgtgagcgctatcctgccgtcgcggcagcccaggtagaactgtaggtgcagttactggatacatattactccagcacgaatccttgcgtgtcttgcctgtattcccgtccatgatacccgctcggatccgcctcactatggttgttcagggaggtcactactagtcctgctgcggattggatatgcttgttgcggatgcgatgtccaagctctgcatgccatcatcacagcctctcaaaagacagcaaaaatgaaactattggtcgatctgttgtggcagctcgtccatctacagtacaagagcaaatgatttaaactaactattgtagcttctcttgtgcgaaaacacagacatgctctctgacgtcctgagttcaaggagcgaagcgaaagtatcgaatgacatcgtccggttcctgattgatccatgacggtggtgtttgaaatactatatcaaagcttgtgccggcaaaaccaccatcttttcgcagccgcagcatctgtctgccatcgactattagaaccgtccatacagttgaggcttaaaccccatcgcgcaagttgcatacgcagttcgtggacactaaagtataaaacgggttctatacaaacgcgtattagaggcacacatattcactctacttacagttttagattgtgtcacatcggcatactgcatctgagaatatttcttctaaactatctgtctgagaacaaccaatgcagaacttgcactttcaggataaaacaaatactagtagaaaaaatgatctcccagccaaaccgtagcaaccttgtgagtaacatagaccttctacaacgtgctgaattctcgcaggtgttaccggtcagtgacgagctcggccaggacgttaacgcttcgttttttacagcacgctgcagcgcttatcactatcaccagacccttggttcgctaaaatatatatattgaacgtaccccacagctaggaaaattgttgtttttcgtaattttcgcagaattgtcgctttggcgatggcaagcggcacgaccggcttacacaaaattctttagctatcccagtctacgcatagctctcgtttaaaatacttcctacggtatattggtctgttacgattgcctggtcgacccagctccatctcgtaattcggcagttacggctgcagcggaatgcgctgtcatgtatgagagcttcattggcgtgccaaatgcacagagaagagggaggtcgagctagcacttggcgcgaagcttgaaggcatagtggcgaacgtaacgggaggagggtggtggcagtggtcattgtagcggcgacggaatgagtggatctagtagttcttgtaacagggttacacgcacaagtggctacagtcacttgtaactctaacagatacgacgtctgttagaggttcgaaagactttctcgaccttggtgtagacacaccaaaggctacatacatttaggatcaccacgacgggtggtccatagagacttaggattcctattggctgaaagcaacatcttttagccaatgagcgacatgcatagcattggaattctgccaaccagccgttggcagattcctagtttaggatattacatttagaggaactcagaaacataaaacacaaatagccgttctcattttaacccaaaacattatttggatcgtttattttttttttagattaatctatactcggaggcccgagtataactaactctacgttaaactaagctacgcttcctcacatacacgcgcacacgtgtaaggtaaagtagtgagccaaagtaggcccattacacctggtagcactttgtagtccgtccaacgaccgactacctgagttcgtacgtcaccgcacgaacgcggagctgagaaccttcccatgaatacggaggtgtccatggagagatccactatgcctgcaactcacattgcacgcgctgactgtccccacctgtcggacccagagtgggaaggtctccaacgactgtcaacagtcattggtgaggcggctgtagctacgatgctgcgtacgctaacgctgacagagcaacatggtgttgctctgggattcatcatgagggagcagcgagatgctacttcgtctaccacggtgtcgtcggggacgacaccgcgcgcgcaatcgctgaagctcagcgtgagcaattacgttggaagagagggcgagcctctcctccgttggcttgtcgaactcgacactgccattgcggctcgacgcatcgtcaacccgttgtcgaaggtcgcgttcgccatgtcatgtcttggcggacgtgctagaagttgggcgtatggacgccgactctcggaacctacgtgctttagcacgtacgagggtttcaaggaggagctcagacaagcgtttgagcccccgcaaaacgagttccggtcgagggcggagttcctcgacctgcagcagggcaagcatgatgtccatgcttacgctcagagagcacggtgcttggtctcgaacatcgtgaccaatccgatcaacgaggcgaccaaggtcgtcacgttcatgaaggggctgagagatgggcctgtgaagacctatctcttccgtgagtacccgagtactctcgaagctgctattactcttgcaatacaggaggagtttagcctgcggtaggctaagctgcatgcacatgtgccgaggccacagccacgcccggtagtgaggacgggaggcccagaacccatggacctctcgagtgctgcaactgctgggccccagcagtcgcaaggaaacaatgtgcaatgctaccgatgcggtagaatcggtcactttgctcgggagtgcacggcccccgtgcaccagcagggtggctatcgcggcggtgccgggcaccgtcgcaaccaaacaaaaaacgctggacgccagtaggcgcggggcgccctactggtaatgcagttccgcgtgtcgaccttggacacgcgacactgagggcggcagcccccagtgaggttcatcctcactgcaagaaccaagatgacaagcctgaccttgtcatcctgaatgtgaactcgatgagagcaagcggctctctccgtgctttggtagattctggcgcgtcgaagaactttgttcgactgcgaagtctatcaaggcttgacttcgaggatttaaagatacctcgaagtatgttggaagtacgattggcaacgggtgccgtcgtgaagtccgagaagcgcatgatacgcgtgcgcttcacgtatgaagtcaaaagtgtgtcgagacctttatcgtcctggattttgacgataagtttgacattgtattgggcatgccgtggcttgcacgacatgatccggtcatcgattgggagaagcgcactctcgtgcgcttcggtcgcgacagcggaacagtgagcgatggccctgttgccgctacgcacgcaccgacaggtacgcgcgactcaccactcgagacggcgcctaatgccgctgtcctggagcgccctgggcgcgcgcgagcacgcgcgcaagaacagccagcgtcggcgtcgccgccgacggctgaaggagaaaatgtgttgatctcggagatcgacacccgcttttcagcgaatcaggaagaatctccgacctcaaggggcacggatgacgcagacgagtcacacgcctcagccgtggaggctaacgcgaatctgattggatcaggtctggccaaaactaagagccaaggtgacgtaacgccgtcgactccgggagtcgatggcttgggtgaatttgattcgtcggctcggggagccgacgcaccctccgtaatggagggctccgccaataacaggcgtcgaggtgaagatggcgtgtagccgacgctgcaggcggtgcggacggttgcaaacgttccgcaccggaaaaacttgcatgctgtcgtgcagccgggctacacgacgaagagccgggcgaccaagccgggcttgaagtcgctcgcccgcgggatgaacccgctggcggtactaaagaagaacactcgtccatggctgggcctggacgaggtcaagaaccaagcggagccgggctccgcaaaacaagaagacggcgcatgcgaaggtcgctgcgcaagtctcggcctggggccgagacgctacaaggaatgtctgccgggcagacggaggctgagaagccggacgttgagacgttgaacgtcttgacgcgtacctgtgccgggttccggtacagggagatgaccctcgctaaccctccgacgcaagcgtcggagttgacttcgcttccagtcatgagctggaagcgcttcgcgcgtgacttgcacgatggacgcatcgagcaaatatgcattctctcggacgccgggagaacgaagagcgagaagaactgaggcagttcttcatggagaccaccactgagagcgaggacactctcagtgcgaagacgaagaaggagcgctttaaagagcagagctggggctcgttgaaaacgagtccctactacgagatcttacgggagtacgcggacgtacttccggaagagattcctgcggagcttccgcaggacaagggaatccagcacgagattaatctcgtgccgggcacgaagtactgtgtcacgcggcagtggccactgccgcgagagcaagtcaaagcgatcgacgacttctttgaaagtcgtcgcaaagctggacaagtgcgggaatcgaaatccccgcacagtgctccgacgttctgtgtcaagaagccacagggcggctggcgcatcgttcatgcgtataacaagctgaacgatgcgacgataccggcgcagacaccgataccgcgacaagatgttatcatcgattcgatggccaggagcactatctacagtgctcttgatctgcgcgatgggttctatcagatcctcatgcgtgagagcgatatccctctcacggcagtgagcatgccgagcggccatgctctgggagtggctagtgatgccgcagggtctgaagaacgcccctgcgaccttcaacaggtgcgtgacacactcgtttttgcgctcggtgcgcgacttcgcaccgagctacttcgacgatgtgttcgtccacagccgggctgcggacgggatgagcgacgtcgggatgcacaaggtgcatttccggaagctgcttgcgctcatgcgcaagcacaagctctatgcgaacctgaagaagtgcatcttccgggcgagcgagatacccgtgctcgggtgtctcgttgggaagaacggtgtccgccctgaccctgagaaggtcagagtgatcaatgagtggccgacgccgtcgaacgtcaaggaactgcggcagtttcttggcttggtcacgtacttgtgcaagtacgtgaaggactacgcgggcatgatacgcccgctgtcacagctcctgaagaaggacgccgagtgggtttggactgctgagtgtcagcaggccttcgatgcagtcaagcggggcttgactgaggcgccgatcttggcggtggccgaccaagatcgcccgttccacgttgtgtgtgacgcatccgacttcgcaatcggatgtgcgttgatgcagcacgatcacgagggccgtgatcgtgtcgtctactactaatcgcgtcagctgaagccagctgagcgcaactacccggtacatgacaaggaactccttgccatgaagtacgccctcgcgaagttccgagtgtatctactcggaagcaaaccgttcgtggtctacacagaccacgcgtcgttgcggacggctgtgaagtcgccgcacatctcgcaacggatggcgagattgctctcattcttcgcagagtataacttccgggttgagtacaaacccggaagactcaatgtggtggccgacgcgctctcgcgtcgacctgactacgccacgactgatgccgacgtcaatgccattgacgccatgcgatcgagcaccccaacgtcgtcactgttggacgacgtgaaggtcgcgtacgcgcacgacgcggatgcgaagctcttgctggcctacggctcagcgccttctgacaaagctcgtcagaagctgccgaagcatcttcgtgctcgtgcacaccgttatcgggtgcacgacgggttattactctacagtgcagtcgacgacaactcggaccgcgttgtcgtggccactgaccatgacctgcgactcaggatcatgtacgagtatcacgatgcaccgactgcggggcatccgggccgtgagaagacatacctttttctcacgcgagacttctactgagcccaccagtataaatgggtgcgcaagtacgtccgtgcttgcgaggtttgtcaacgtatgaagcctgcgcctttcgcgcaggctcccttgcagtcactaccaactccacgggagtgttggcagtccatgtctttggacttcgtgctcggtcttccccccgacagccaggggaacacgggcgttgtggtctttgttgaccgcttgagcaagatggtacatcttgctgcggtacccgctgaagtgactgcgaagcagacggcgcgtctgttcgttgacatggtgttcaaacaccatggcatgccgatcgacattgtgtcggatcgagacccgcgcttcactgcacacctttggcaagaagtgcttacacttcttaaagtcaactttcgatgtcgactgcggatcatccgcagacggacgggcagaccgagcgcgtgaaccgcgtgctcgtagacgtgcttaagagctacgctcactcgttccaacactggagcgagtgcctgccgatggcagagtttgccatcaacaactcggtacatgcctcgaccgggcatacaccgttctacgtgaatgccatcaggcacccacgcctcccgagtctactcaggatggtggctccttccttaagtgggggaggatctacgactgcaacgcagcagccgcagaatgccgctgacacttgcacagtgtcagccgcgactacgcgcaagaagaagaagaagcacgcgtctgtgcagggcacagatgtcgacaagagcaagaagaagaagaagaagaagaagaacgggtctgtgcagggcacagacaccgcgaagacgaacgcagaggccgggcctactgctagaaacgagctgaacgagttcagctcggacgcaatcaacttcgtgcagcgcagacaagccgtcattcggtttgtacaagacgctatcgcagcttctgtcgaccgacagaagctgaacgcagacaatgttggtaggggcaacactaatgaattcaagaagggttcattggttttgttagcaactcaaaacctgcctaaacatgcagtttccgacttcggggcgagcaagctcgctccgcgcttcatcgggccgttcacggtgttggcacggcatggcaacgcctacacgctagatattccatctagcatgcgcctccatccgaccttttacgtcgggcggctgaagccataccggcagcacgagccacctagctcggctggcccgaagcggaagccccagcgggagcgaacctctgctccagcgcgtgaacgcgctgggccaagcgtgcgacgcgacctcccacgtcgacagagatgtccgacgcggtctgcgaggcctgagcgacttgagccctcaggatcgccacctcctgcttcagagcggcgaactcccggctctgatgctgctccacagcagcgacccgctcctcgagcgtcggaccaaggttaaccccaagttgaccatacccggggcgtgttcccaccaccgccgcttccgatccgcgacgcccgcggctcaacacgctggattgttgagcgtattgtgaaccatagtatcccgaaaacgaaccggcagccggttcgttatcgtattcgttggagagggtttccgccccaccaagatacatgggagccacgggacgtcctgctgcaggacgttccggaaatggtgagggcgtacgaagctcaccacgcactgccgacgcgaaggtagtgcgagcgctgtggtcacctacagcgcccgaggtcccacgatcgtcgcgttcctcgcgtgccaagaacttggcacggagatccttgagactctcaggtacacgaatcgtcgtgtacccgtttaggtcgcggtcgctcaagtgcgctgcacccggaagacacaacgtgcactgttggccttcgggcacagcgcatggaataccagcgtccacagaggatctgtggagctgctccagcctcccgcgcgtcgagtcttggtcacgccccacattgagttggcctccatggcaatgggaacgtgcgtggataacatggaatacaatgcgtatgaagtctgaagtacttgtgaaccagtacagcaatgcaattggagttcaaccattttgggtccagtgattgggcaaaatcccagataatggcatatgattggctagtggtgaatcattgcaaatcttccgaagagcaacctgtaacacttcaacgcgttgaagttggtgaaccatctctggaccacatgcgacgaggcagatcgactggagcaatgaaacgtcgaaacctgcagcggtgttggtaagcttggggggcagtgtgatgatggcatgcagagcttgcacatcgcatccgcaacaagcatatccaacccgcagcaggactagtggtgacctccctgaacaaccatagtgaggcagatctgagcgggcatcatggacgggaatacaggcaagacacgcaaggattcatgttggactaatctgtatccagtaactgcacctacagctctacctgggctgccgcaacggcaggagagagcgctcacaaactagctaaggtagtttactttgcattttgcatctacgctgattagtacacgttggcttagtgggagtcccagctcccaagtatcgtgaccacgtcacagaggccgaccgtcggcctacccgtctcggggtcggcttgctgctgctgaggcacctatcgctgagctacggtaacaagcgtaagctaagaatatcgctcatcagcgacgtggtgccgaagaccagcgagcagcgctgatctcggcaatgattcctcgcagcactcgtgtccaaatgcaacgactacggaattttcgaaatgctctccagcttgtctcggacaggctatattcagttaccggggccaggtgttcggcttcagtaataccggcttcaggtaccgaggtgccgcctaattaatctgtgttgggctggccacagcactccctccggggttactgctatcccagaataataaatcaactacatgtaatctggcagttgacttattatcaaatcttcgtaaccttacattggcttatggataccaccgtaccaacaaggaacagctacactgtacctgcgctctgttgcgcatcatgcaatttatcagatattatgggtaacaacagctctctagcttggtggacctggcatcaccaccacacagactgaaattcttgatcgacgcagtctcgggactacccgtgaattagtcccggtgtgacaacgattaacactcggtcccatgaatatgtctcttgccaggaacacaaacactgttgaggccctggctagaatagcgctttgaactaataatcccattgaggtcattgcgcacttattcgcatgctaccatctcatcaatagcatagggaaattgtgtggcattgcggcgacgatgtgccttcatctcgtgcgaaaacaaaatgaacgggtggccagcacactaatcactacagaacccacttggacaagccgtagcacacgtcctgaaaatgcttggtccaaactagaaaccctagcctgggaaacactaagaacgtgtgctggcacctgaacaagggctggtagcgacttgtagaacacattctctaaatcatatgcttcacttaccatactgatacgtagatctttgtatggtgcctatttaaagattcccaaagtgccgatttcaagtccaaatgggtattaggcacaatatcctagtttgttgatgcatgcatactgtatcatgcgtcccccgaaacaacacctcaattatggccatagccaaacgttccccttgcagacagataccgaattcagaataatatttgagccaatgagatgcttcgaactttgactcccttttcagattcagatacagaagaaaccacattcacggggtgcgtcaggttaggactttagtcctaaatcctaatatgagtcaaattaggacctcaaaaaagttaagattaggactttcgcttgtttgacttgattaaagtattattgtaccacaaattgtgcgatacgacgaaaaggtggtacactatagtgaactcaagttaacagatatttttgtcctgcggaatgccgtgtccgattgaggtcaagcattcgtgcgggcagctaacacttaattcgctcgcgcacaaccaaacgtgtgttagcgaatgaaaccatggcctgccaaatgacaatgagatccccaaagtcagcagcgcaaatacactatatctgggcttacacagtatagatcggggactgagacgatgaggagtcagtaagatccaccagctttggtaaagggaggagtttagaagtgctgtgggggcttttacgaaggtagtatgagattatactcaagtagcggggtttcgcccttgtcaaccttcaagtgcacatgtagccatcgtatcccgttagaacttctaagaacttcatattaggcaggcctcccaaattgggggaaatggggaccatttcccccactataccctgttaggtgaattcatgttggcaagctattttcagatcttgataagcatcgagctcattcagaccccaaacaaacaggaacatacccaggtggaagcgtgtttctccggtaatggatcgccccactcatcacaaatattgtcaaatttccgtaattggtggtattggcaagtagcatttaagctcaaacggacggcgagctgaccgccgttggtctgtaggcgatgctacagaagaatgcaagtttaggagcagttttatcataggctatgttaataaattacatacttaatttaagtaaagcggcgccaatataaatacgtaagccctaccgatcaagcaaagttacagagctagtcaaaacttttatcacgattagtgatatataattctttcactgacattcgtttctagctaattcgtatgcggatgaaccgtagcactttgaatatcgtaggttgaatccaaattagcaccggctatgccaatccctaagatatttatcttactttcactatcgtcccccaccatacccattttaaatcctcaagtcgtcccctattaatctaattggggaaatgcaggatttccccgaattagggaggcctgatattaggatttttgcccgactaagtacgaaagtccttacctgacgcatcccgcacattcaacgcagatggaagagcggtaacgttacagggatggcaggcacgctgcgcctacaggcaatgccgaactcgttgagagctggggcagtgatgagccgaattgggatctatgatgcagttctatgcgactggtgtctaatgggggctatcgtattagcagttttgctcagggaagcaccgaagcaagactgtgttgcgtcggttagatttgtgttgcgtcggttagatttgtcgaagatcctagcaccgccctaggcccccgctatacacaaacttgggtgcacgcatcaacaacgctttctacttgcttgaggacccacaagggcggcggtggtgggtcttagtggcacgcaatacgcagcgatctcttccgccaaggcgctcgtgcaccggcggcttgccgccgatcttcgcgcaaaacctgccgagtgtaatccacaccatctggattgcacatgctcacggggctaccgagtgaacatcttaattccgatcaatttgggccaatgagagatcgattttgctaagttttcttgctgaatccggcatctgtgagcaattctgactaccattgaagaaaccgacatacaaaagctacaaaatgacattaactatcgagactgcaaactcatcaggaaaacctaattgatctgcccagttaacctacaattcacctacagcagcatcgcaccggccgccaacacgaaagtcgacacgaatcccgcagtcaccgtcgtcgcgctgctggaacccgtggtgcttcctccgacgaccttgtcactgttcgagccggagtcgtcacccacattggcagcgcctgaagacctcatcgacccggaggacccagcgtcagtggagcccgtagacgtcgatgatgcactgctgccgcacgcagcagccacacggtcgagcacatcagtttgcaccgtcacgcttgagcctggaatggtgcagtcaccgagatccatggccgctacgtcggccattagtccgaggcacgccgtgctcgtgcaaatggtcgagatatgggagtctgtcaacgtcgagatggtcgccacactgacacccgtttcggtctggcacgtggccaggttcgtgttgcttgcgaggccaagcaacgcttcggtggggcagtcggcagcgcgaacggggctggccatggcgaggccgagcaggacgatcgaggtgaacgacggcatcttgactggaaccttggagaagattggccggaccggagtgtgctactcgaggtgagttgaggaatgaagaaactggggcacggtgcgactggcggcgctgtgctcgccagaagcgtgatggtgttcgaacacatcgaggaagagggtgcgggtgtgttccggggaactggccatgtggctggggcctcagctaagcaagaaacagcaggggtcagatcgcgtcgctgtttgtggttgcggtcggtggcgacggtcccacgcgcgagaaactgatcgctggactgttatcgttttctctaaaccgtcagtagatgtctcttgtcgttgggctccatgaacattctgtcccagagtcacacgcataggaaggcgttgagatcgatgcgttgattcaaccgtccaaaacgttcattaaagttgatttcatggttcattcaagcgctttgcttatcagttcaccttcgtgagcgaacaaggagaaggcgtcttgaaccataccagctgcagaatgctgtagtatggagcgtagcgactaagacagtagtcgctggtaaaagtgcaggtggcgatcttgtacttaggcaaaggcagctgcaaccgcgaggacgaccgacccgagagcaaccgagaccgatccagcggacgacgtactcgaggcactcggagcctgcgtgctcgaagtcgagttgctgctggtcgctttcgaaccggtcgtagcacccccagtagaactaccagccgcagagctggttgcaatgctgccagtggagcttgtggctgtgctgctgacagtgtcatgcgagtcgtggtcgtcgtcgtcaccggcggcagctgaaccagaagctgaggaagcgatgtcgtgcgaatcctccatctcgctcgactccgttgcagtcgacgaagatgtcgcatcatgggaatcctccatctccatcgagcccaaagaaatctccatcgtggatccgtgctggtgcgatccatcagccgctcgcagagctctggtggcgctgcacacggccttgatggggttaacgacgctctgacgaagaccttcaccgtcgattgagcactccccgatatcttgcagagcttcaaggacatgtccacaggactcatccgcacagaacgactccaagttggtaacgatggcgttgaccgtagactcgacaggaaccacgaagttgctcccgagcttgcagctggaggcatcagccgagttggcaatcgcggccaacttgctcacgccgcagttggcagcgttcgtgactgcgaaagcagcgagcagaagtgaggagatggcagccttcatgttgaagtggtgggggtagtgttgaccggtgtgcttgcgggggcaaattgcagaatgacatgttgcaagcacaacgattgagatagagagctctagaagtctttgccttggaggctccgacagatttccgaccccatgcttgcgtggggatcacctaggcacgcgttggtatgtgcattccgcaataaaatggaggcgcgccgaagcacgctgagcacgcgccaacttgacgcatgtgatctgtaacaaacgcgtacacactcggttcgtgtgatggctaccaactcggatggtaattcgtttcgatgaccgagcacgagcaatgttgcatggcgttggaagcaacttgcatccgatttccaccggcaaaaagcagattttcatccaacattttctgttcgcatggacctctagaatccaccgtcgcacgctgctggatattcaaggccgtcaatagaatttaagcacgatttcggctggcatgtcgacaggaatgcgcacacaaggcacgctgcctcggatatgagcatgaagtcgacgttggcataggcgagcaaacgagcaaaatgtgcacaagtatcttaagcctgtatccatcttttcagtatccaattaccctccaaactagatttgttatcttacaccggatcccatccttttacctttcacctcgtataccccgtgcatcccgatttcaaccatcactcctcccccacatccatcctctcgtccttgtcattccgcaatccacacgaagaccccgaggagaggagaggagatcagcagcagcagctcgacgccatggcgaccgacaagtccgacgtggacgtgctgacgtccgtgctgtccgccatgacggtgcgccaccacgacgagaacctcgtgacgcagcgccccgccgccacgctcaaggagatcctcgagaagatccgcgccaacaaggaccagatccgcgagctggacctcaaggacatggcggccaagaagcgcaagctcaggccggcgggcggggacctcgtgggccgcgtcttccagctcaaccgcacggtgctgcggctgctgctgcccgaccacgacatcgaggacgtgggcgccaaggccatgggcaacatgctgcgcgccaacaacacgctgcagcacttggacctgcgcggcaacgagatcacggccgagggtgcggccgccatcagcgacgcgctgtacggccacgagtcgctggagcacctggggctctccagcaacaagctgggggacgctggcgccaaggccattgcccaggttctgccgtataatatctcgttgaagtacctgggcctcgccaataacggcattggcgaggagggcggtaaggctttgttggaggctattctgcagaacaggtcgctggtcatggtgcagctggtgaagaatgatatccccaaggagatcctggacaagatccggtcggccctcgtggtgaacaagctcatggagcagaaggctaaaagggacgaggagagggagaaggagctcgctaggttgagggaggaggtggcgaacaaccaggacgaagacagctccagcgacgaaagtgaggatgacgagtccctctggatttagagtgggggcgtggaaattgtgagcatccccttgcgatggagtggtgcctactggtagctgagttgagtatgtgcagagctgagaatgaagtgatctctagttgtaacgtttggtgtgggatgtatgtagcttgctggactggattagttcggtgagaacagtggacacatgtagatttatcctttcgtggggcttccacactatgaatccctacgttgattcgtgagattgcagaagtatggctagctccttgtaatgcggtgtcatttccaccgtcagccgcttcgaagctgtgacctttcgcagtctagatcttcatggacgagaatgtggcggcgcgtccgcaggcgcgagatgccgatgggaacgccttgatgtcgctcgaggagctgaaggaggggatgttccagtccattcgtgacaacggcacggtggagcttattcgggtgggtgcttggctgccatcgaggtacgagtccgaggagctaacctttgttcgcacaggcgcaactacgtcgacgattcatcgagaagttgcagcagcagcgtcggctccgagatgaccaagatggcgagaataatgctagtcgagcgaatcgatccactcaaagcttaacaccagatgagaagcttgttcatgggctggtggccgagtatctggcgagtaagggtctggagaacacgcttgccgtgttcgtcccggaaattggcggatctcggaatcaagtcgacagtgcaacgatactggaggtgagctttgactattttttcgcactggtgtaaacccatggcatgactgaattgttttgttaaatggaaagatgctgcacgtgagctcaactactcaaaatcaactggtgaggcgagtattgttctgcagctctgtatttggcgttatcatgttattaacccgtggcaaattgaaggaactggagcgagcgaacacaggtcattcacttctgctcgttctcgtacgagagcttgtgaggcggttccagcttgcaactatggactcggggacgcagacagctatggattgttttgaccatcgaatcgtcctaggtacgccgctttacggtgactagaatgaattctggccgttcactaacgcttgtgttcgctatggtaatgcttgagtacagaaaaccagttgagaagagtggagaacacctacctcgctgaatgtgctgctcaaaaactggaacctcagaaatcattagaagaacggatggtccaataccagcgagagtatgacgagatctgcgataagcgacttcaagaagagttggagcggtgcaagtccacggaggttgcgttggttcgagctgaagaacggaagcgtttcgatcgagaagtggataacctccggacgtctctcttacaggagtatcgcaataagcaggaacggcttcaagagcgcgaacacgacttggaacttacattcgttgcccgacgaacagagcttgagacgtcgctttttgaaacacgccagtctctgtttaaagatatggagaggctgcgagtgagggaagccgagttgcaagttaaagtggagagcgattttcgacacttcgctagtgagactcagcgttttcaattatgggaagaaagtgttcgaacgcaagaagctaacctggaggggatagttgctcaagccatgcgggaaaaagaacgctcctggcaaatcgaaagacagaaagctcttgaggaaattcacgccaagcaagacgagttgtcagatcgggaacaagcacttaccactgaagtaggaacgctcaagacgttaaaggcacaggtggtcgcactgcagcaggaggttgctgcattggaagctgcgctatcggtatggcattgttgttttactagatagatctgctgcaaaactaactcatttaaatgttacgtatggcgatagaaatcaggagacgatctgtgcgcgacccaaagtacggtttcgcagcttgaaaaggatcgccagcgtttacaagagcgcgttgcagaccttgagttacaagtggatgaacagaggtgtagtttgagcgatgctagcgctaccaacgctcgtctcgcagccgacagaagtctggttgatgacgagttatctcgctacaagctgaaaaacgcggaggtgaaggagcagatgaagactgtttcggccgaagttaaatctctgcaacagcagatactggacatgaaattcgacgaggccaatgcaatcgttgcagagagaaagaggttcatgcagataatggacgaggaacgcgaccgttttcaatggaaagagaacgagttgctggcaaaagcgcgggagatgcaaagtcgtttagccgagtctgaagcacttgccgagaagtatcaaagccaatacgaggacgagaaggttcatgtggagtctctgcggcacgatgtatcgagtttgaactccctcttgacacaagctcaagcgacgatcaatgcgaagcatggcgctccgcgagagattgcatcctttcgtgttcagcggaatacgggaagtagtggcgatacattcgatgcaggctcacctgatcaaatgcggtcaggcaacgaacgcacctttatgatgaaaatgatggaaatgatggcaaacttgcaggatgctggtacttcgcgatccagcagcgttcagcgagaccatagaccactggaccctggtcgtggagtaccagccgtcttcagtcaggagtctgttcgccaggtggctacttctcaaccagttgacgaagccgaagaagagtctaagcggcttaaacaagatcaggaacgtattgagcgagaattattggagcaacgcgaatacgagaaaaagaagcaggctcggatggaggagcaacaacgggagctcgcagagcaacaccggctgtttgaagaaaagatggcacgtatgcgtcaagagcgcatcgaagaggaagagcgactcgaagagcagcgaaagcgtaagcaggctgaagaagaagcaaggctacaaggggagctagatcgacagcgtgcagcggttcaagaagcagcagacctacaacagaagttggaggagcagcatttagccgatgagaagaaacgagttgaagacgagcaagcttatcaggagagaaggctagccgaagagcgcaaattcaacgaggaaatcgaggcgaagcgccagcaacagcaacttgaagataaagcggcagcgaaacaacgacaggagagagaacaggaggaagagcgactaaggcaagagcgcatagcgaatgaggagcaagaacgtatccggttggagaaggaacgagaagctgctaggctgaagcaagaagaggaagatcgccagcgcgaagttgaactaaagctagcagaagaagagagaaatcggacggagtcggagaatgcagtacacgtggataacgatgcctcgctggaggatgcttcttggcaaaagtcgagtgctgaagatggctctgatcacaacggcagtgaagacgcgagcgctgataccgctcttgaagagactgatgctattgtacaagaagccccattggcaattgacaacactcaagcccttccgctagaagatgcaacgccctctgatgaaggccacgtacaggaagagccgttggtagcaaatgctgacgacagtgagaaggaggaggacagtattcccgtcaccgtgtcagagccaccaccgaaaacccttgaggaagaagagcaggaaagacaacaagctgcggaggaggcgaaaaagaaggaagatgaaaacgtcatcgacgtgtatcgccagcgcgtacttgccaggaaagcagccgagaaacagcgccaaatggagcaagaagcggaaaacgatcgaaaggcgaaagaggaggaggaacgacagagactccagctcttggatgatggaagcgagtctgaccatgagctggagctatcggggggatcatttgccgagtcgaggtatgtgacgcattgctgcattgggctgtgtttattgcttcgtgtctaacctttaaccttgtgaacttgctgctgtagtgctgcaagcaacagtgattcgttttaagctttgaataatcggttgtcactagcatacatgcacgatcgttttgcctagcgacccttccattttttgcctacgcctggtagcgtcagttttcgattgtttcattcttcaccacgatgcctctagggaacgaagggagagcttctcgccgtccgatgcctcggcaactggatgtgagcggctggggcgcagattcgtcttcgacgtcggtgcaagatcgctttcggagtgaatctacggagtctaggagagccgatgacttcaattatagcaaaaccagcgagatatcaagtcgtttcgacaccttcagggaaaatgagtatcgacctcgccaaattcccacaagggaagaactacctcgactgcatgaggggagagaaccacgtaccgattatggcttcagcagtgtttcaagcgaacggagtacggccagggggagctcattagatgcgctcttcacatccattacgagtagtagggactcttcccgtgaaaccacatcatacacggatcgaggggggcatgacaaccagcgcgatgatgacgacttctctcgcaacaggtcatccgggttgagacggcaagacgaggagagagcatcagaatctacggaccgcagtgggtttcgacgagatggcaaagataaacgcagtgatgacagcttttcctcgggatctaaccgtgcagcagaatactacagcactcgctcttctttcaagccaccgaacttcgacacgctctcgagatttcccaacgtcgaagccgattctgtccgagctgcggagacgcctgtagctcgaatgggctccctcgtggcggcatctgcgcagaacgacaaagagcctactcgcaaaccatcggaattcagaatctcgtcgctcgcttccgataatgaaaaccaagatgagctgcccagcccaacgaattcggagacttcagcctccctttcatctccagattcagagcacgactcgattgcacaaagaatgcgaagtctctatccgaagccgtcgattccgtcgcctctggcttcggatagatctgaagagagaaactcgccgatggcttcaacatgttcgcccctatcgacgagcaagacattgacaagattcaaacaagaaatatctatgccaaggactgacgcctccaaaagaggcgctcaatcagctatgagcgacctgcgtgaggatctctatgcatttcgcaagcagatgcgcgaggtcttcatccgcgtggaagacatggtagacgtgcaccgctcgttttttaagtccgacccgagcactggaagcccggtcttcaaggcggacttgcagcaagaagcggaaaaactggcaacccaagcgttcgagcagcttagtgacctacgcaagcaattcactcgactcgtcagcgattttcaacgatcggaacaaccacgtgatgaatgttctgaccgtgatcatgagcggaaacaacttcgagcaacaactaccagagcaccacctcgatcacgaagagaacagcaggccgtatccagacgtgctgtttccagtcacggttcagacgacgaagggatcagcgtgaagggctcagctgtatctgacgatgatggcagcgatcgcgacagcagcgatgagaggcccagagagcactcgtctagtatctcacggacccgggcgtcgtctcaagctgacagcgatgacgatgcgccgccagccaccatgccggactcggttcgctccacgacgtccaccttcctctcgtcgcagttgcagtctcggtggggaaacccaggcgggtccatcgccaatgggagcgatatcagctcgcgctcacgtggtcggtctccgagtattgtcagcgatgtgagctccttgccggaccagtgcagcagaaccaccagcgagcaccagaccgacagcatcttccaaggtgaacctttgttgcctttttcaccacttcaacttgccctctgacgttttttcgctgacttccttgctctagatttcgacaagcgcatggaggagatccgctgctcgctcaacgcgattgcgagcggcaagaagccgcatcgtagcagcgacagagttgcggcggtctcaccgaaaaatttcaaggtaaagttgaagtggccgaacggcttcacacttgcgtccaccaaccgttcttctcattgctctccctatgcatcgctcgcgttttgtgtttacagcatggggactcggtgtctatgatggacgcggcgcgcacgcggtcaactctgcgcgaggcgtcgcggatatccaccgctgtgggcctcgacgtcgagggcagcaacggcatcgaagccaagccgccccggggcgcgcgcgaggccgagctgcgccaactgctgaagcaacttaatcaactcaacggcgacaacgaagcggacggttgaaacctacacttccagcaataagtcgtgtagccatgtcggttttggatacgataaatcgagcataaaattacgcgtaacatcctgctgatgggcaacgtcgacacgaaaggtaaaaagcctttcgctaggcgcctcgaacctgataaccaaagcaaaacagcaaaccctcgccatccgcggtcgtcgtcgaaatgttgcactgcactcgctctccatggcacttccttcccgagccaaaagtgagccatcgttatgtatcccgtaaaaattcgaccagccagcctcaaaaatgaacctatgcagctctgctaagcggtacactgtaccactctgttccctcagactgtccgctaacggcaaggccggtatgcgatgcgcatttgctgactttcctcgctgggcagaggccttatataacacttgaagcatagcattgccatggctccggcggcgaccgacgcagcgcagcgcttcaagctcgtgatccgcgtgcacagcgccgaggagctgcagcactcgtcgtcccagggcgcctactgcaagctctacgtgggggccacgcccatgaccgagggcagccaccgcgggctgagcaagaaggactcgggcgactcgaccgcctcgggcgaggacgcggacgacgcctggcagctcgaggtgcggcgcacgcgcacgcagcaccagcagcccaacgcgctggcgccgcccgagaccatctgggacgagacgttcgaggtgcccatccgcccggggctggacctggccacgcagatcctgagcgtgcgcgtcaagagccagcacttgttcttctgccccgtgatcggcgcgtgcgccgtctcgctggccaacttgtgccccggcgagcggctggagcagtggttcccgctgcagaagggcaagaagcccgccggccgcatccgcgtcatgctgctcattgcccccgaggataaagttttgaaggccagaaggaagcagccgaaccaagacgtgatggcggcgagagcggcccatcatgaggcggacgaggccattaagaggctcgtggagaagcagctcagacaggaggccgagaggagacagagacgactcgagcgcacgtccagcggaccccctgtcgaggtgaaaagaccggagaacgatgacggggagggggtgaatagacacaagagagcggagaacgcgacgtggccaccccctccgggggtgtcgtcccccaagatgttgccaccactgggcacccccgcggcgttcagagataatcaagatggggcgagtatgagaccgagactgccgactacggagcagttgccagtgcccccaccgatggagcaattgtcgttgtctccaacgacggagcagtcgccggtgtctccgatgtcggaatatgagcagcgtctggacaggaagctgcgccaggtgaggaaggagacggcgcggctacggaagctcaaggagcagctgaagaagtacattccggacttgcagatggactcggactcggacgactcgctcgactcggaggatgaacccgaggcgctgctgaccgggtcgtccatgtcctcgtcggcgtcgacttcgtcggtttcggagaggacgcaccatcttgaagaccaaccgaaggagacaacgcaccgcagtctcgaggggctcaagcactctcgggtgaaatcttcgccccacggtgagaagaaggggggccaaacgtccatggtagacaagaagtctgtccccatggccttctagctgggcgaggtgtgtattactgtcggcaatggaaaaaggtttccataggcacggatctcctggattgaggaggatagtttcaatagtcaatgttgtacattttgccgtcccaacactggcgttaagaggacaagacatgccgccaccttcggtttatccatccttggcacggcagggtcctccggcagaatgggcaaccaaaactaccagagagagagaacgtcggctgcaagttgccactctccggggcgccagattcccgcacacatcacagaggcacaaccacttcatcccccgagcgatcttcagcttggatgagccaggtttctttggctacatttggcgacgcgtagctcagccaggttcactacgaaatcggacgcaactcctcaatgccaagctacgctcaggactcgttcacgctctcgctgcacgtgcagtctggccagcacctctccacgcacgtgagcgccgctttctgcacgatcgtagtatggagcaattcgtctccgggcggccctgccgagttgacgacgcagccgaagtacaccagcttcagctccgtcggcgccaacgagagcgtcgagtggaacgaacaaatgcaggtgcaggtgaccagcccggcctccgaggtgctgactcttcgtgtgaaggactcgacggactcgctcgtggggagctgcaacatctgcctggcccaccttcgtccaggagaggcattgaaccagtggttccagcttcaccccgccggtcacatccacctgaagctggtgctgcgtccgaaccagcagccagcccccactccgtcagtgaatcccaattcgccctactccgcagacttccaggcgctgctcgagctcgagatgaagaagagagcggcgacagtgaacgagtcgccacttccatcgcacatcgcggcgttgctggaggctcggaacaaggcgcaggagagcacgatgctcctgatccagtagcagcttcaacaacagcagcaagctagctacagcccactaccctaccggtttccccaccggctaccctccagctcagccacaacaggcaagcggctccaatttccacgaaatgatgggaactgccgccaacatctccaccatcgctgccaacctgcagcaactcaacggcaacaacgccggagtcggcaccagcggactgggcaccgcagcctcaatcggactcggcgccctcggcctctgaccgctcggactcttcttcgggtcgtaataggcgaattgcgtatgtacccacgtgttaagctgctgtcaaatacattgaagtgcgtctgaacaatgcacgctctcagccacgctctcggtgtttaaggtccagcctcctgatcagcaacaatggcccgctgagcaattcatccgtgagtattcatcacacggcaatcataagcttaccagtagttgcaggttgaagccgccttgatgggtacactttttttccttccatggcgactatccatttcattccgcaatttgccgccaaccgctcaagtggaagagagaaagaatggagcgactgacgtcctccaagagcctcgggttggccgggtggggcaacccgacgctgcatcagagcggcttcacgctgttcctgcgggtgcactcggcccgtagcctggcggcggtggggcgcggctcgtactgcaagatctacctcggcaacacggagctcgtgaatgggtcggctcagggcggcgcgtccttcagcaacctcctggctgcagacaacgcgcagcaacaacagattcaggtaatgcaaccgacacaccgagtcttccgaacgaaggtgctgtataccgaccagaagtcgtgccccgagtggaacgagaagctcgagctccacgtgctgaacccagagacagagatcttgactattagagtcaagaaccagttgatgctcttctgccccgctattggggcgtgtgcgattcctctggcaaatgtaacgctgggggagccggccgagcagtggttcccactgcacaaaagcggcaagccggcgggtcacatccgtcttcagttgctgctgactcggaaggacccgacggtgactccccctcctgcagtgagcgagtcgcctatgcagaggcttatccagcaacattgccagcaagaacgcgagcggcgtcagcagctgcagagtgacgattccatgagacgacggcagtttgaagagcaggagcgaatgcaggcagagctgagacgacagagggaggaagcggaggagagggagcggaaccgaatcgaagacttggccgggatgcaagccatacaagaccagatccagcgcgaggagcaggccaaggtgcaagcgtatttgcagaagcagatggagcatgaagatacctggcaggcagacgtgcttgctgagaagatgagcgcggttaaggtggaggacgctccggaggattcgactaaagaatcgactaatgggaccaactaccactttgctgacgacgtggtgacagcttcgataaggtcatcgacatcgtcggtggggttgaagcagagctttaatgctactcaggaagacaaccgtcgtggggaagttgctgaagctgtggagctgaaggacgcggtcttcggagaggtggtgcacgacgccttgccgtcgtcggattcgtcatcgtcagatagaggcggcaagcggcgcagcaaccagcggaaggagaaggaacgtcgcaagaaacactcaagaaagcagactcggagcgtgaaagaggacaaatcgagtcgtactcaagctcctctctttccatcagcctacgaggaggagactcgctacagaaaatattcgtcggcgtcgatagctgagtcgtccagttcttcagaggaatcgacgtcgtctgaagaagagcgtcgtcggcgacgtcgccgccgcaaggagaagaaggccaagaggaaggagcgccgtcgcagacgcaaggccaagcgcaaagctcgtcgggagtcggacggatacgagtcttcttcttcgtcgtcgtcgtcttcatcgtcgtcttcgccatcgtcatcctcatcatcctcggacgagcgtcgcaagcgcaaagcgagaaagcacaagaaatcgaaggagacggctcgatctcagcgcgaaggcaaggctagctcgatgccgcgggcgcgcgccccgcctcactcccactcgtatggacctgaccactcaagctactcgaaggaatcgaagagcaagtacaacgatcccgctacaccgttcgcgcgacctgcgcaatcgccgtttgcagcttcttcacccccaggctacatcgaggcactgcctccgcagcctcaacagaaacgatcgatgggggagatggccagcactgctgcagatgtggcttcaattttatcgagcgtggcttccgtggcgacaagcgttcagcaattggcaggcggtggggacgccggtggaggtgcaggtggcttgaacattccgttcgcggtgcccgacatgagccaatttctcggaggccaggatttgtcggggctagcgggccaagacttctcgggcttagttgggtctgattcgacggcgcagtacttctagcgagcgcaacaataggtgtgtgctacatgtagcgtctggttcatttggcgacgtacagtagtagtcgtaacttgctggtcggaccgacagaaacaaaaatacttgttcaaataatacgccattcctaaccagcgaacggtcaagcatagccgtgaattaccgagcaaacctagaaggcaagcgctacacgatctgttgtttgctaactttcgcctgcacctcgcctagttctctaatgtcgactcagtaagcttaccaatgatcgtgtggctgaagcctcttcagatggagcaggcagctttggctttttgctgttcgcatacgtgagtgatggtcgaaactccaagcgaaaccgcgggcatcgttccttgcggtgcatttgcttgttttattttgcggtgcatttgcttgctttattttcatttccagctcgactaacttcgggtgtactctataacttagggcggagatcagcggacaaccagctgtacgttacacggcagtacagtacagcgtcgagtagtacactcctgcagcattgcggccatcgcttagctgactgcagccactcactctgcagttctcctcctagcgctcaagctaagtactgtagcgcccgctatgacggtgcagccggacactgcgtccctcatctcccccgcccccaagaccaagcagccgcaatactcgacgttcgccagcgtcaacgaccaagtagaagagaccaagcatcagctgcaccatgcaacaacgtcaactaacgttatcaccccaggcactgcgtccttgtggtcgcgcgtcttgttctcgttcgccaaccccatgatgagcacgggcaacacgcgccagctcgacaacgacgacctgtgggagctcgaccgcgacaaccagtcagctacggtgttcgacgagttcgtgaggcactacgagagccatgacaagtccatcatcaaggccatggccaccacgtacgggggccccttcctgctatgcgctctggcgacgctcttctccaccgcgtgcagcgtcttcgctcctgcggttctgaaccacgtcgtgactgcattcgcggccgcgacgatcgacatgtacgacttgggcctgtggctcggcgtgttcttcgcctcacgtcttgtgaacgccatcatgctgccccacgtgcagttccacatcgagttgatcgcgctccgcctgacggtgtcgctcaaggggctgctcttcaggaaggccatgcgtcgcagcatccagagcaaaggcgactccaacgccgtggacatctccaacctcttctcgtcggacgtggacaacgtgctctgggcggcgttcatgagctacagcgtgtggatcacccccatccagatcgtggttgtggtcttcatgctgtacgaagtcatcggcgtcgctgcctttgccggactgggggtcatcgtcgcctcgatcgtagcgggctctatcatcgccaaactctccggcgacacgttcgaaggggtcatgcagcacaaggacaaccgcatgaagaccatcaaggaggtcttcagcgccattcagatcgtgaaattgaacgcgtgggaggacaaattcgcagacaaaatccacaagttgcgcgccacggagctctccgctatcaagaagtacgtgtaccttaatgcgctcaacattttcgtgctgtggggctctccgttggtggtctcggccgtgtcgttcgccgtgtacgcgcttgtgatggagaaggcgctgactgctgcgaaagttttcactgccatcgctctgtttaacgccatccgtgacccgctgagagacttgcccaccgccatccaagcttgcatccaggccaagatctccatcgaccgattcacggactacctcgctttggatgagttcgacccgaacaacgtcacacgtgatgaccctgcgcagccacaagatgtcgccttggctatcgaagacggctcctttggctggacggacgagacagcgctactaaccgacgtgaagctcactgtgaagcgaggtgacctggtcattgtgcacggatcggttggcagcggcaagtcctcgctgtgctccgcgatactgggagagatgaacaaattgggcggtaaagtgttcgtccgaggcagcgtcgcctactactcacaacagacgtggattcagaacatgaccatccgtgacaatatcctcttcggactgccgtacgacaaggagaagtacgcgcgcgtgatcgcggcctgtggtttagtgccggacctgaagcagttcccaggaggtgacgaaacggagattggtcaaaagggagtcaacctttcagggggacagaaggctcgtgtctgcctcgctcgagcatgctactcggacgccgatactctgctacttgactcgcctctcgctgctgtcgacgccatcgtgcagagtcagatctttggcgactgcatctgtaacttgctcgcggacaagacagtgatcctggtgacccacggcgccgacatcattgcgagcaaagctgcgaacgtgaaggtgctggtggaaagcggcaagttgactgctactcgacatgaagttgcgttaccacgctgctcctacacgctaccagtgtctcctcgctcgacaaaggacgacgatgaaaaaggcaacaacaacaacaaggacaaggatgcgggtcggctggttaacgatgaagaacgtgaagaaggtcgcgtgtccaaggaggtgttctccaactatttcaactcgctcggcggtgtcaaggtctgcgtcttcctctttgcggtgcagacgctgtggcaggctttccagatcggaagtgacttgtggctgagccgctggaccggacagaagaacggctcgtacaaccaagacgagacagcgtacaacatgaaggtctactcgttgcttggggccggtgctgctgtcatggtgttcgtccgctccacaaccgtggcgattgttggtctccgggcgtctcgccacttgtttgacaacatgactcaatcgctattgagggccccgctccgcttcttcgacgccaaccccattggccgcattgtgaaccggtacggcgacgacatggcggctgtggattccatgatccctcctgcgtttggaggtttcctcgccatgttcttcttcacagtgtgtcaacttgcgacggctgtgtatacgatgaacttcctcggtgctttgatcatccctctcgtgtggatgtacgtgaagatcgccaacttctacctcgctccgtctcgagaactgtcacgcttgtggaaagtgtcgtcttctccggtgctcagccacgtgagccagtcagaggaaggggtcgtggttattcgcgctttcggtcgagacaccatcgatcgaatgatcaccgagaacttcatccgcaacgacctgaacagcaggtgctggctggcagacaccgtcacgcagcagtggtttggtcttcgcatgcagcttctaggcagcgctgtgattgttctcgtggtgtctggattggtgtatctgcgcgacttcctgtctcctggtatcgttggacttgccttcacgtacgcgctcagcgtcgacactggtctcgctgatctggtgcagtcgtggtcctgggtcgagatccaaatggtcagtcccgagcgcattctcgagtacgggtcgatccccgctgaaggaagcaagcgaccgcttgtcattgagcctgatgcttcgtggcctcgttcgtccaccgtccagttccaggatgtggtcttcagctacaagcagggcgggagccccgtgctcaagggtttgtcctttgacatccgcaacaacgagaagatcggcattgtcgggcgtactggtgcaggcaagtccagcctcactatggcactcttccgtatcaatgagctggtgtcgggaagaattattattgacggtgtggacattgcatcaatgccgctgcgtacactgcgctcgcacctgtccatcattccgcagtcgcctgttctgttcaagggctcgctgcgtgcgtacatggacccttttggcgagttcacggacgccgacatttggagcgcgctggagaaggtggacatgaagacgcaggtgtcggctctggaggggcagttggcgtacgagctgagcgagaacggcgagaacttcagcgtcggggagcggcagatgctgtgcatggctcgcgcgctgctgacccggagccgcattgtggtgatggacgaggccacagcgtccatcgaccacgcgaccgagaagaagctgcaggagatgatcaagaaggatttccagaacgcgacggtattgacgatcgctcatcgactgggcacggtgctcgactcggatcggatcctggtgctgagcgacgggaaagtggtggagttcgacagccctcgcaacttggtgaaaggtggaagcggggtgttctatgagttggccaaagagggaggctatctcgatcagttgctgtaggtagccaaaagatactaacgttaacagagaaagccctgtcctgacagcgttattccctcactacagcgtggaaaaagtctaagcagacagtcctttgacagcaaatagcgggcgtgaaaggcagcggaatcggtgagggtggagtttgtcatagctcgggacattcagcacatgtagcgcggtgggagcagtgataggatcctggttcattgaggtcaacttgctccgcgcgtttcgcccatcggcgtggacaaggtgagtctaggcttcgttacacttcaacttgatgtcaccggtattggagatcgagccaagaccaaagcgagcgcaacaagcgtcggtcgagtctgcccggtgctctgctatccatgccgaggccctgcaaggatgcgtggccaagcaacgatatcgtggcgccctcattgaagggatggcgaggcaggtgatactgtttctggtgcagtaaagtctggtggcggatcattcaccctgacttgatcattccagcggtgcaagctgcaccaagtacataatggacaatagacagtctccagagtgtcagcacgcacgcacgctgctggacactgctcgagcaccatcatgaaaaggatacacagagcgtgcagagcacgagagcaagtgtgcttcaaacagcccgatatcgatccgcggctttgcgcaagcagcggcagcagtcacaataatggggagatatcaggggcatccaacggctgcgttacagacaacgacggataaatccgggcgacactaaaatctggaggacaaagtcgtgcagtgtacaacagcgtcgttccagccaatcaaatttgaccagtagacttggtctttgtatagcatatgctttcgtgtacactatatggattgttgtgtgttttatgaacattgttgtgtattttatgtcggtcaaaagtgtttttagtggaaacggacggggatttcattgcattttactatgggctatggcattcagtgatcccgggtttttccgtcgttgtctgtggcagagtctctcttcatcgactcaaaatcagcagtcttcgtcgtgtcctgcgcgacaaaatagtaagaacacacttccattccagtgaaaacacacagaggatgggcgacatcataaagtagacgaggcgcgatagcgcccagccaacggaggcgaggagcgtagccgcagcaaacccgcacggggagcccgcgaagcagggccgcgcggtatttgcggaggcgggctcagtgacgagcattccagcgagccgagcacttgcactcgccaggtgagagaatctatatatgtttcgtttcgtttagttcgagtttagcaatcgaaaccgtttagaacgcgtgtttcgcgaacgattgccctcatttcgtcgacaaaactcgagtagccattttttagaattatttctctatatttagactacattttaacattttgctcgccgcattcactccgagggcgagtgcgcactcgcgcttcaacttcattccgcactctgtgcgcactccgtgcacggcttccgcacccagtggggacactccaagggcgcacggaccatcaagactcttgcgcagatcaaggaagagcgacggtgagggtgaagtggcgaaggcgctggccgcggcgtgcactaacatgttggattcgtggagcagcaatgccaggagggcgaccaaaaagcgaggtctggaagcttttcgaagaaccaggtggtgatggaagcgtgaagtgccagcgctgttctgctcagattgccaacccgaagccacacaagctcgaaagccacttgacgaagtgtgatggatactcgcttgtggtgaacaagaagaggaagcgcgcttctgaagagcgtgcggaagaggcggcgcggcgaaggagtctgaacagtggagatgtggagatgctgcaaacggacgccgaagacactgatggacaaccgttgatgtcatacatcgtgactcaagccctcgtcaacaaactggtcgccgactacatttacgagtccgcgtcggcgtttcgatccgtggatttgggctctttacagtgtttggtcttgaccttggcgcatggtacttgcacttcaagcgtcaaaagttccatcgcgaacggacgttggcgacccgcttctaaagcagaccgcaaaggaacacttcgagaagaaagttgctatcctgatgaagcagaaattcttcgcgttccagctcgacggatggtcgaatcccagacgggaaaaactgatcaatattctggcgtcaggcccaaatatggatcccttgcacctcgagaccattgcgactggagtcgactcccagactggagaatatatcgcgaggcttatcggcgcaaaggtggacaaattggacgcgattgttggcgaaagcaaggtgtcgagtgtcacgacggacaatgcgcctaatatggaaaaggcgtggggaattcttgaaagcacgcgggggttgctgtgcaatggctgtgctgcgcatgttctcaatttgcttttgcaagatgtggcataaatggacgagatcaagcgggtagcggctggcgctgaggcgatcacatcgtacttcatgggacgccagcagctacttgcccggtttaagatcgagaaggacgatatggctcgatccaacgcagctgaagtgcacggtcgctcgttcaccatccctgttggtacccgctggtactcctcgtaccattgcctcgtgaacgtgatccggaacagagaggctataacccgcgtgttcgacgacgatgaatttatggcttcgtacagcgggaaaaagaatctgcgaacccagccaacaccagctcagacaacgacatcaacgcgacgaagtacgcgctccaagaagaagacgaagaaggctcaagaggccgaggcccaacgaaagaagaagcaggaattgaaagcggccgtcttccaaaacgttgacaatctagtgcgagatgaagacttctggatgaagggtgaacaagtaattcagctgctggagccgatcatcaagaagcttcagctactagaatccgaccaccgctacatttcaatggtgtactgggcgtttcgtgacctcctcaagcagcctatttacagcgatccaacgtttttggtcagtacggcaaaagcaatacttgtgcaatttaaggcgagatggaacaaaatgcacacggatgccatgggcattgcattcttcttggacccagctcaggaccctaatggttttgttggcaaagatcgaaagaatagcaagaagcagatccgcaagatggcgaagagactgggttacacactggaggaagttgatcaagcatatcacgaagccggcgtattctggaatttgaagcgggattggacgcccaagcagcgccgtattgagtcccgttctgcacctctagagtggtggggcgacgagcgcgactcttatccagtcctgtctcggatagcgcgccgagtgttcacgatgccgacatcgtcagcggcttcggaaaggaactggagtgctcacaagttcgtctactcggatcgacgagttaaccttggcctggacaaaatcaacatgctgatttccatgtactgggatcgactggagaagaagccgcttccaagagttatcttcaactccacaactctacagacggcagtaaccagtgaaggtgacgacgacgaagaggagaacaggattcactacgaagcccacgactcagatggggaggagaattacgagcatgaagtcttagctcaagcgatgacgatgatgaattggacgacgaacagcagaaggacccagaaaaagccaaggcaatcagattggcccaagaaaacctggactacttccttcatgataccttcgactaccaggcgagtaagttttgagtacgactttgatgtttggcgagtaaatttttgagtacgacttggatgctaagttaataaattcacgttgtcgtgagtgcactttgcttgcaattgaaagtatgaccagcttcatcggtcgtgttggccctttgtggacctgaatagcgtcgcgccgaatcccgttcatttcgtttgcaaattaaacctaattaatttcaatttcgaacgcgaaactcaattaaaattgcgaacgaaacacacactgcgattggcttgaggcgcgcgctcggccatcacggcatcagctcgccttgcatggccgatccccttcccggttgcgacgccaattgtcgacgctcaagggcatcagtcgatgtcggcgacgttagcgtcctccagcaagcgatataaagcggcgacaccatcctccggcagacgatggggcaagttgtgacggttcaccgccgattgatagccccgtgattggcgagaggcatgcgtctcggtgccaagttgctctcgcactcctcttaggagtgtgtctggggcaacggagacctcgaccacttcttccgctggtgatggctggctgcggggcggccagcgggctccgctgaacggagacctcgatgtgctaaccgactgaacgagtgtcaagctagacgaaacaccacgccacatccccactgcttggtcagctccggagaccatttccgaattcgcttcttcccccaaggcagcaccaccgaaaagctcaggagctgaccatgtccctacgcgagtcgaacctttcgacgcctcgcatcggcaagagcttgcaaatcgaggagggcacggactacctcgaggccaagtcgcccaacccgatggccaagttcgaggagggcgctctacgcgaaggccccgcgcccgacaccaagagcaagaactacttcggcttcctgttccagtacgcgggcgccgggctgatctacagcgtgctctacagtctcacgtaccctttcctcaataattacctgcggatgtcgggcgtcgcgacggcctcctgtgtttttgcgtgggactccgtgtgcggcggcacagctcagaggtcggcaaaaagaatactggggccaagtcaacggaagttttgtgggattttgaaaagactcaaacacgccataaagtactcaaaatgtaaaatcgccctccgcgcccgcgccaggcctcatgctcttccgcttcaggtaggaagcgcgggaggccttgcattcgtagacacggcacgtcttgcagcagctgtagaatgcgccgtcctccttcttctcggtggggctgtggcatctggagcactcgccgggcacatgcttcacctgggggcagcgagggaggccgctcgcttctcgcttggctgcgcgtagggctcggttcttggccccggtggcgcggcacgagctgcattggctgtacaacttgccgttcttcctttgagcgcaagctttgctgcaattgctgcactggccgggtttcttctgcggcttcggtggcttgatcccgagggctgcgcgcttggtggccgctttttgcttgcgacgagctgtgaggcacggcactcgtcgcagcaggcgtacaggcccttgttgcctgtgcggtcacgggcctgaccgcacagttccgcgtacagcacatgctacatttcccaggcgctctcagtctccttttctcttctgtttgggcgttgaacttggagcaacactccgcgcacgcactgcgggtctcgccgggaggcttctcttttccgcattgcgtacacagcccgtattcttgtctgaggtgatacttgacttcatcttttcttctgcagccagtgcatctgaacagtccgctgtcagcggggagcttcgccttgcagctaatgcataagcctgcttctttcttttcttcataccgggccttggctctcttctgcgcgttttccttcagctcggccgcgacaaaagcacctccctcgccatccacaaacacaggaacagctgcgagctcttcctcggcgagcccctcgctggccatggcgtctgagatgcgcttctcctgctcgtccacccattcgtcgtcaatttcaaagaaatgttccgtctcctttgctttcgactcctgcagtgcattgtccactaaaagtataacaaacaccgtaagatactctttaagatttaccatttgcattgaccaatttaccttcagcagccatgtagtgaaatgtcaggctttcgtaggactgtgttagtcctttgaaagaggggttcacagagccgctagacgcgaagacatcgtcgacaatgatgaactacaaagggaacagattaggcagtgtaagtaagagcccatcggccacgcatgccaatagcattgtaccttgatatgctgcgtcttgctcttcttcttctgcacgaggatcttgagttttgctccgttcttcttctcggccagtagcttcttcacgcaaatgagctggtacggagccatcaccattctccagtcgagcagcagcgtcacatccacccccatctcaagcagctcctggatccggccgagcactcccaagtctgtcagcgagaagatctccatgcgcaccttggaggtcttcatgggcaggtgtagttgccacatgtattgggctgcaaacttggggttggctcgcgagtagatggtacgactcggaggcagcatctccacctttgcgtagatgtcaccgaaagtagacggatgaatcctcagcgcctttgcgatctcgggcagcgtgatctccggacgctccacgcgcagcctccggatctctcggttcaccctaacgggctcgtgctccggcttagccgcaggcccaaactggtcccagaggtctccgcgcaagtatcgcgtgaggaccttcttcactgtgcgcccgacacgcggtgggtcgaggtgctggccgaactcgtcgaagtctttgggggttatggtcttggtcttgtcggcgcggatgagcggcatcagcttcttgatgatcttcagacgctcctcgtcatcagtgcgcggcgcgaagtgcttcttcttcttcgacgggggcttcttgctcgtcagccccgagctggccttgcgcttccccgcggccttcgcctatctcgcggaaaattcgattgtgaggcaggtcgaagttgccttttggaactttagccgcaggcacctctcagccagcttttttttgaagccacctggcgctcaaggttcccaaagcctcaagggccgtggcctacgtgttgatcgccctcccgtggtcgctcaagaccttctacggtatcatcaccgactgctacccgatcttcggctaccgtcgtcgtccgtacatggccatcggctgggccgtgtgcgcggtgtgctcgttcgtgatggcggttctacccgagggagatccgtactacccggacaactcgtgggcgtctctgtcggagtccgagcacaccgccgaacaaatcgccgagatcaactacgacgcccccgacgccggcatcaagttcgttctactcatgatcgtcgccaacctgggcatggtgctgtccttcactgcgtatggcggtacgctggtagaactctcccaacgcgagggggagaagcgccgtggtgacctccagacgatgatctgggtcgctcgtgacgctggcggcgtcgtcgcatccgcgttggtcggattcgggctcaactcggaggaatacggcggcaccttcgccgggtccatccgcgtggggggtctcatgggcatctgcgccgccacttccatcatcacgggcgctgtggcctggtactgcatcgaggaggagaaggtggagcgtcggtccgtgcgcgtcgagctcggcaagctgttcgacctgatccagtaccgcgtcgtgtaccaagtgctggcctactagttcttcggcacgtgagcgtgacggcgtccacgccgctgcagagcgtctggttgaccatttcgcccgtgaacagcagcatcgccaccatcatctcgacgcttatctccatgggctcgctgctggcggtgcgtcagtggggcttgaactggaactggcgctggatgatcgtcatcacggagctcgcggtggtgttcgtggactgcttcccgacgttcctcacgatctgggacgtcgtgcgcagtcagtggttctggctgggcgtccccctgctggagcaggtgccgaccaatatcggcttcatcgtgtccacgtactgcatggtggagatcatggaggagggcaacgaggccgcgttctacggcctcgtggtggctgtctcgagtctcgcgtcgcccttcgccacggtcatcaccaagaacattgacgccaacttcgacatcgccaccgccgacctccagcgtgacgacacggaagtgcgtcagcaggtcacgtacgcctacctctgctcgtatgcgtgcaagatcttctcgacggtctttgtgctgctcattccgcgccagaaggccgagacgcaggagatgcggcgcaacggcggcaagagcaaactcatgggcgtcatcgtggtcatcatcatcatcgccttcacgtacgtctggaccatcatgaccaacatcatgcccatcttcccgtccacctcctgctaccagatcgccggcggcgacggctgctcctagatttctttacgtattgtgcttttcggttgttttggcaaatcggacgtgtaaaacagctacctactaagatggggctaggttatcggagcagattagcaggtccctcgtagggaattaggaccaagaattgctagtccgatggaagcgtcctacaaacagccgaaagcccgaatgtcgcccattttcacggtattcggggtttgaggtcttacgaaggactcctacctagtcttgtggcaggactttcatacgagctgactctaatacggtgtatgtcaaacgcagaataaacctatgaaaacacgatgcagtcgatacgttaaacactccagtcgtcgccattcgccttcgcgggttccggcattgcttgcttccccaaacaaagattacttgacttggactccaaccggagtccattgaacggagagactccaggagaccagtcatcggactcgtccgagatttgcatctcagatttagagaccaccaacctcagattaactgacctccaaagtcctacgtaggactcggcaaaatagagaggtttcgcaaagcaacttgtgagagttagcgacaatacattccctacccctctatagagacgtgtgtctacaagttgttctcgactcgtctagagcgccctgtacacgttggtacttgaggagatacgggtaagcattttacaatctcccagcaatctttactatggagaagccaaaccaaacgcacaacaaccccgtggaggaggccccaccgacgaagcgtcgtaaaacgatggtccgctttacggatgagcttgacttccaactgatccaggaagctcaagccagaaatccgtatggggaagactacgggaagaagacccaggcttgggctgatgtagctgcagctttggtagtggacgtcgacggtcgccgttgccgcgagcgctgcaaccagctcgtagatgcgtatgaggcaaagcagatggcgagtgagaaaccaagcgggccgtgtgaagagtacgcgccgaagaaggaatgtctggcgaagctgctggagatgcgcgagatagaggcgctgctgaagaacgacaagaagcagcagaaggaccagcagcaggaggaggacgagcaagctagcgctatgcgcggcgcagccttagaagggatgagccgaggaggaggaaaaggtggatcgcagcagcagcaactggttgcatatctcgaacgccgcgaccaagtcgctcaagcactggaagggaggaaggtcgccaacgaggggaagcggcttgtgttggaggagcgacgcctggaactgcaagagctgcgaatggaacttgagcgagacgagcgacttgcgtttattgaaatgttaaaggctgtcgtcagcaagactagttcgtagtagctagactaagattctcctcgaggcttggcggcttaatggaaaagaatttgctgatctggttggggttgaaacagttgcggaagtttgtcaggagtacaccgaccaagtagtgtttccccacaggtgatagatatagtctttgactcagtctcagatcaagaaacggccataagcgaatgatccctccgaacccccactccactgccacgcgaactttactcatagccgcgttgaatgccttttgcgtatcactcagattggagcccttgaaaccgacgtgcagcgttggtttgagtgggtaggcaggatccccatagatgcaataccgaagttccccgtcgtgatgtaagacacgcggaaggcgctccagcagtccactctgccttaaaagccaagagtcgtgacgacgtccaaccgtaggaccgtaaaagttgatgaatagtccgtccagcgccattactccttggtattttagcgcgtgtttcctcttgtgtccgttgtaaacttgtttttggttgcgcgttgggcgtgcaatagcacgcacagtgccatcgataaaaccaatgcatctcggctccggtgctccacgttgtgccacagcagcagcgtactactccaatcgcgacgacgtaagtagcccacattcaatggtgagtaggcatttgtacttgtcgtacaccaaccccagcatgaagttaaatatcatgcagacaataggggcggaccgcccgaaaaagcggcttaagtctccataacgtcccgggtatgccatgcggcgcaagagaatgcagaggccctcgaaaccggagaagccagctcgatttgggagtttatagctgctgtctaggcggagcgcttcaaagagtcgaaataggtctcgcttccagaagcgaacgtagaaccgtgtttcgtagtcgttgagcgcgttgatgttaaagcgttcgccgtaggaaatggaccgggggacgttgcttgtggacgacgttcgagcagagaggagacaaaccgcttcttcctctgagagcatgccgagcacgagaaggtcttgtacgtaagtagagtccatctttgaaaatgctacagacgtacaagtctaagttgcgaaagctcgttctagaacttggccgaataaatctatggccgctctctgtcaaatctttcgaacggctctaacttccacaagtttaacttgcgaaacctctcaaatgaccgaaaggcacaatagatgatgtttgttgggggatgcttcacatcggctgcatgtcttacctcaatacacgttctccacttggataatgtcatgatacctgtatcaaggctgagaacagactggaaatgttatcataatgagtcgggaggtgaccggctcacagtgtggcaccgcactccagtactgcactgtaatggttcaatcatcatggtacaaccataatggttgtacaatgaggtgctacagtatcgtttggcaactaactgcatgaggataatgacaaatgcgtgatgcatcgtgaggtggagtgtggattttgactttttggcaactgcggaggatagcgtttgcgttgcgacaccgcggtgctgagtcagcgcgaaagggattttcaaggcaaaaaagtagccatctgatgcagagcaagattttgtgcgtgaaacgaggaccgaggcgcccggccagctatgcaagctttcgggtcgagctgccggcggctgtgcacacatgaaaatcaagcggtgctgcagcgaatggattgggctccgccttgccacaccccggctaggataggcacgccgtgccgtgcacatcggccactctgcttggtgtcacacaggctcacgactcgtgaatcagcgattcaaacagcaaatggcgagcaccaccgcccaaacagcaagcccccgactagcaaaatccccgttagactcccacgcccagcaatggattttcccaacaaaaagcttttcatggcaaccacgagcaccgtgctgtcccctttacagcaactacctccgtctcttataacttgcagctcccgctctcattggtccgcctgtcgactcaccctgctatcataggtacaccgccggtctctaccctccttaaaatcagtccgccggcagatttgccatccaaaaagagcttgagaggctctcgctcgctcatggctcttggctcattcacctttgcgccgcgccaagagtcaacaacccccgaaatctttcattaacttatcctccccgcacccctcctttgaccccccccccccctccatggcgtccgcagcgcgcgcgcccgtgcggcggcaggccgagtccaactacctggacgtgaaccgcgagatggcgctgcaccgcctcgagagcttccacgccgcggcgcgcgggcccttcgagctgctgcagagcaagttcggcttccagcgcgcgagcgtggccaaccagaaggagaacctgggctgctggatctccaactaccagatgcgcgtgcgcgccgaggccccccagggcgccgccgagagcagcgacttcgtcacgcgcacggcgctcgcgcgcgtgcacaagaagttcttcaagaactacaacatgtggtgtaagtttctgcgtacgcccccgcgcgcgtgcgacccggacaaggacaacacggcgcgcatggagaaggagctggcgctgttcctgctgctgtggggcgaggccggcaacctgcgcttcatgcccgagtgcatctgcttcctgtaccacaacatggcggccaagctcgagttcctcgacacgctgccggacgtggggggcatgttctacctcaacgcgatcgtgcgccccgtgtaccgcgtcatcgccaagatgcgcacggccacggcgcccaagggggagcgccccttcgaccaccaagacacgaccaactacgacgacgtcaacgagttcttctggacgagcaagtgcctcgagtgcgacgagatgaacgtggccaaggtgctcgaggtgcacgaccccaagaccttcaaggagaagcgcagcgtgttcaaccccgtgctggccttcttccgggtctggtacttcttggtcgtcatgttccacgtcatggtggtcatcacgtatgtggcctacatggccgagggcgacgacgacggcgggctcggatttttcttccggattttcgacagcggccagaataaaatccgcgcccacgcattttactccatcttcgtgacggtcacggggctgttggccatgaaggtggtgatgcagatctggctcttcggactgaggctatacaaggacctgtggatggccgtcggagtgttctgcagactgatctggcactcgatgttcttcgcgctgtttatgattatcaacttttccccggatgagtcggcgcttttcggctcgctgagcagtattttacccggaggaggcactgccgggtcgtatctttccatggggttggtgtacttggcgctttacagtatcccggtactgaccgcggcggccatgcgagcgttcttccccaatgcgatttggggcattcgagtggtgaacgcgctggacggaaccagtcgacagtacgtgggacgcaacacggcgcagccctgggccaactactcgcagtatttcctgtcgtggtttattatcttcttctgcaagctgctgttcgcgctgcagttcatgatccgcccgctgatggcgccgtcgattgagatttatgacatcaccgtggacgacaatggcgtgttccagtcgggccacaacatcatgttcatcatcgcgctgtgggctccgatcttcgtcgtgtacatgtacgacgcgcagatttggttcattttgtaccagtcgatcatcggtctcatcatgggcaagcgcatgaacattggacactacgtgggactggcgcagctcaagacgggcatggcgggagcaccgaagctgtttgatgagaaggtcgtgtcgctcaggaccaggaagccgaacccggaggtcgcgacacctgttcccggtggaggcgacgcgggtgaactccgtcaccgtgacgttgtgcgtctgcggtttgccatcatttggaaccaagtggtggacaacttccgtctcaacgatctgctggacgaccgcgagacggttatcctgcagtaccgtattctgaacaagggcgagcgcatccaggagccgattttcctcctggctggcaagttgtcaaaggccgttgacgtggctgcgaaagcgcgttcgagcaagtgggaccccgcgactttgatcaagaacatcgctactgcggacgccctggaaggcatgaagaacggactggacctggtccgcgacattttctatttgctgctgggcgaggaggaggagaagggcgcgctcagcgtgctggagtacatttactcgtcgcccgatgttgtgtccctgctggatatgacgtacatgccgcagctttcgaacaacatggtggagctgctggctgtgatcctggatatgccggaggagatttcgtccatcgactcgctggacaacctgccggaggagctgcggatggaactgcacgtccaagtcgctcaagtcgtcgaccgcctccgcgctatcgctttgacgatggagttgatgctgaaagatgaatccgtatcgcgcaagctacacacctgcaggttcctgcaggccaccgacgacctcgagttccagacccagaggatgatctacctctacaaggctgatgctatggctgaaacgggtttgatcgccgttcatcccggagatggatcggccacaatgccgccgcgtttcgccccggaggacttcatttccagttgcacgcgcctattcttcttgctccgcctggacgtcgccagctcgctccctcgttgcgaggacgccaagcgtcgcatgggcttcttccttcactcgcttgcgatggagatgccgcgggtggattctttggaagccatgccgtcgttctcggtcatgaccccttactactctgagaccgtgctgtttacgctggatgagctgaacaaccccgttcactcgaacgcgctgttcgcggagctggagaagaagcagaaggagaagggctggacagagcttacgatcatgaagtacctgatcacgttccacgctgaagaatggagcaacttcctcgagcgaatgggcgctaggtcgctggacgaggcgctggagatcaacccgacggaggtgcgtctctgggcttcgatgcgcggtcaaacgctggccagaacggtgcacggaatgatgctgtacgaggacgcgatccgacttctgcgttggctggaggtctactcgctgcgtgacatgaacctgcaggaaaagctggacgagatgaaccgcatttccgcgctgaagttctcctacatcaccggttgccagatttactctcagcaagtcgccaagggcgaccatcgtgcggaagacatcgactacctgatgaagaagttcccgagttggcgtgtgagtttcgtggacacgatcaaggagaaggacggcgaccaggagatcactcgctatgacggtgtgctcgtgaaggctgaaggcaacgagattgtcgaggtttaccgctacgagctgcctggcaacccgattcttggcgagggtaagcccgagaaccagaacgtggcgctgcccttcacgcgcggtgagtacctgcagacgatcgatatgaaccaagagcactaccttgaggagtgtctgaagatgccgaacttcctggcgactgcgacgagcacgggcgaggaggtgactgtgattggtatgaaggagcacgtgtttaccggtcgtgcgtcctctctcgctcggttcatgacgctgcaggagctggtgttcgtgacgctgacccagcgcgtgttggccaagccgctgcgctcgcgtatgcactacggccacccggatgtgttcgagaagtccttcgttgtgacgagtggtggtgtgtccaaggccagtaagggtatcaacctgtcggaagatgtcttcagtggttacaacgttactcttcgcggcggattggtgacccacgttgagtttatgcagtgcggtaagggtcgtgacgtgacgctgagtcagatcaacgcgttcgaggccaagctatccaatgggtgtgctgagagttgtttgagtcgtgagggtcaccgcctgaccaactcgctggatttctcgcgcctgaactccatgttctacggccacttcggcttctacatttgcaatgctctgacagtgttctgtgtgtacgtgtacgcgtactgcaagctgtacgtcgcgacgcactcggaggtggagatcacggctatcatgaagaccggcagcctcgactcgctgtccagtgtgatgacgacgcagtatctgcttcagttcggtatgctgaccacgctgcctttgttcgcgactctgttcgtggagtttggcttcaagcaggcgtcgatgaaggtggtggagctgttcgcgacgttgggcattgtattctacgtgttcctgacgggcacgaaggcgcacttctacgacgtggctctgattcgtggtggctccaagtaccgaggaaccggtcgtggtttctcgatcacgcgcgaccccatggtgaacttcttcaaggagtacggcgtctcgcacttccgcaaggctgtggagctgatcggcgtgatgattctgttcggagtctacgggtcgtttgacatcggctccgatgcgctggaggagtactgcgcgactgcggacttcgactgtgacacggacccggatctgattccttccaacatcacgtcgctggcagcgttcagcagcaagtcgcagagctacggcatcgcctcgcttgctgtgctgttcctgggtgcgtgttggctcatggcccccttcgtgttcaacacggacggtctggtgctgcagaagtccaaggtggatatcgccaactggttcacgtggatgatgcgctcgcagcacaaggacgacgccaacaacgacgaggagaacggcaagagcgcgagcagtgccgctctacagccgaaggacggatgggacgactggtggaagtcggacgtcgacttgatggtgcctctgggtcccatgggccgtctcacgtactgcctccgtgagctgcgccacccgctggcgatgtattatgttttcctgaccgagttcacgcttccgtggcttgctctgctgttcggagctatgggcgctacgtgggcgctgctgtggtttggaaaccgtgtgcaccactgcgtgtccaagcaccgcaagctcaagtcgcttgcggttcaaggcatcctgtacatggtgggcgtcattggaggcatcatgctggtgccactcatccttggagctatgggcggctggtcggtgctcaagtgcttcacgttctccatctcgatgatcttgggcttcaactcgattgtgcagtacgcccttgcgttcaacggcgtcttcggaatggaagtggcgatgtggagccccatgatgacgcttggtttcctcatggacatgatcgtcggcatcttcctggtggtgccgctgttcctgctgtcgctgctgccgttcatgcgcattctccagacgcgtgccatgtacaacggcggcttctcgcgcgcgctgagctcaggctcggaggtggcggcgtcgctgtgcatcctgctgggcctgctgggcggcttcatccacggcttcacgacgtcctttgtctatactcttggctacattaacgacccggacgagaacttcatgaaccgatcgttctactacttcgtgacgaccaagctgcccaacagcggctcggagatgctgagctatatggagaacggatacctgaagatcacctgcgctggcatgagcattcttgccgtcctcctgtcgcttcttattgggcgcgtcctcggacgccgcgtgaacatggcgatcggcagcagtctgatcttcgcgtcgctcggcctcaactttatctcaagtacatcgatcatcctggtgtcgtgcggcatggcggccatggggtcggccatgctggtgatgaactacctgctctacagctacgagatctgtacgaagggctggcgcggcaagagcgtgaccattttcctgcttggatctatgagcggttggttcgtgcactcgctgctgacggccaatacgaacgcgaccaccatcagcgaggactgggacaacaaaccgaccaatatgtggcgcctgcagccgatattcgtccagccagcgctgatcatcgccttctttgccattctgtggttcgtgcccgagagtcctgtgtggctgcttgcccaccagcaagaggagccggcccgcgccgtgctcatccgtctgcgtcgccgtcagaacgtgaacccggagatcgcaatggttcaggccgaactgacgcagaagacgagggagaaccacctcatgttccgcttgtccatcgtgttcgcgctgcaggccgtcttcgggctgattatgtcgcagtcgctgctcatccgacgcacgctgcaggtgaacgcggacgactcgggcaacgccaacaactactgggaggtctacttcgcgctgtgctgcgctacgggctacgcgttcggcagcttcctggtggacaacgtgcgtcgcaagaccatcctgaaggagttcatgccgttcgtggcgctcatggcgtttacttgcggtgtgatcggagctgtgtcgaaggccgatggtggcctcgttcaggcgttgtcgtgcctgctgtacatctcggcgggtttgagcatcatgagcgtgacgtggctgtcggcattggagatgttcccggcctcgcgcagacctctctactggacgctgtcgctctgcgtgttctacgctgttcaagtggtgatctacctgctggacccgtcgttcgcgctggcgcacttcatcttgtgtggctgctcggtggcgcttacgatcgtgctcttcatgttctgcgccagtaccaagctgggcgcgatccagaccaaggccgagaagaagtaccagcggtccatgcgcgagtccgcgcccgaaattgtggaagcggtcgatgaacgtggggacgtggacgacctgcacaagcagcagacccgcattgcgcagacgtcggctgccatgaaccgctcggcagcgtccaacccggcgtcgtccgctgctcaagtcaactttggcgcgtcaggtgctgctcaggtgaactttggggtgtctggagccagcacgcgcggcggtggcccccctgctagcagcgccggctcgcgcgcgcaggccaacgccacgcagttcggcttcagcggcgtcaacgtcacggaccagccgagcgagtcggctcgtcgcagctcgacgcacaatgagacggaccacttcagcttccaccgccttgcgagcatggaggacccggccaccaccggtggcaggccgcagctgcgctacggagtgagcacggggctcagcagctcgcagtcgtcgtccacggacttgtccgccacgaacgccgagcggctgcggcagatgacgcggctgtcgtccacgttcgacttcgaagccgagttcgaggccgagcacatcgaggacctgcgccagggccagatcgcgtacccgcgcggccagccgcgctccgtctccttcctgcagtcgcagcagtacccggacgccgagctgcacgcagagacccagtccgttcgactctaggatagagatgatgtagtagcgtaggtaggtaggtaggttacagacaacgacggataaatccggcaccactgaatggcatcctccatagaaaatgtgccagaattctctgtcaggaacgatagatattatacaaggcaatgacataaaatacacgtaacggagcataaagtacacacaaatttatagaaagtacttaaaaccatatggaatacaaatgtcaagtgtaaatctcgaagttgattggctatctgaattacttattgtaaaaagtacaacatatgtgtgccgggttttgcgttgccgtatttatccgtcgttgtctgtaccttgggcagattataatagtcttggagactagatgaacaagtaaatgcacgtttcatattatttagttggcagcgtttcagcttcggctgaagttcgcaatggaggcgccaacaggtttcatcatgcaagtgatggataggcttcgaagagcggctggggcattcccacacccattcgagcgccatctgatgatggagaagtcacacgtcttatgcccctcatcatctttctttcgccagcgatggataggacgacggacagtcacgacttccgccggtctcatgcgtgcacgaaggaaggaaggaaggaacgagggggggggggttgtccaacaccgacaacaagcaacaaactctgcatttttcacagttgatcgcccgacaattccccacttcgtcttcttccttatcaatccgtgccatgcaccgaccagaaagaagcaaaaatgttttcccaagttcgcatcgaggcaaaatgctcttttgccctcgcaaaggtggctacactttttgcttccggcggccccaccctggcagcagcaatgcacgtccagccccaaggccaagtccacacgggccaccgcattttcagacctgattcctgtcgctgctggccgacgacgccgcgaccagctggacgacgccgtccctgccacgacgcggcgatcattcgcaagccaagccaaacagtaaaaacccgagtcgactcggtaacgaccagaaccagcccaaagccccaagcaagccccgccccccccaagacaggcgctccgcctctcttttcagccgtttcgcagcgcattcgtgctctcgccgccttcatttcgcagttcagttccgagtcctccctcacactcacacggttcaggtagaatgcccccgcggtccctcgtgctggtgtcgagcctcctggcgctggccctgtcggccgtggccgaggcccactggatggcgctcgaggcctcgtcctcgtccgagtgctgcagcacgtgcatcggcaagacgtccaacaccgtgtacgactacgaccccgtcatctacgcgcagtgctcgaacgtgaccggcggcatctgctgcttcgactgcggcgacctgggcgagccccagtacggggacacggtctcgtacgcgtcggacggcgtcacggccgtgatcacggccggcacgtacgtctccttcacctggagcagcgtggtcaacgtcacgtacatctcgctcaagaccggccagaagaagaccaagacgccgacgatctcggacacggcggcagacgagaagtccagcacgttcctcatctgcgccaaggccgcgggcaccatctacttccgcggctggggcagcgactcgtgccgcgaggcctcgcaggagtactcggtgaccgtggaggccggcgactcgagcaccagcacgtgcgacgccagcgacgtgacggtcaccacggcgtccagcgccgggggcgacacctcgaactccgtggcgcaggacgacaccgtggccgagtgcaatgcgcagcgcgccagtgtgcaggtcgtggacggcacgcagacgtgcgtgtgcgtctcggactggaccaacccgcccgagtgcgaccagtggcccatctggaagtggctggtcaccgtcggaggtggcgtggccgcgctcttctccatcatcatctcggtgcgcgcgttcctgcagggccggaagaagaagcaggaggcggaagaccgcgagaacttggcgcccatgggcagcaagagcgacgtcgagacgctcgaagtgacgcccgacagcggctaccacagcaacgccgcgttcaagtacgaccccgaggcggaccgcgcacccggaggcgcgcggaaggcggacgaccgcgaattcacgctgtgaggaggcccccacttgtattcagttgaccccaaacacagataacgttatagcgcgggccaggcccagcgcaaactagttccctagcttccgtccgtccctccagccccacttggatgtgtctcctacgtcgtggaattcgctacgatgtttaatgtagtgtattctacgagatggcatgcatgggcaggatgaagcagcacccccaagatgacactgacccttatgtgcaatataccccctcagctcctttttgaccctaaactggatggaatagaagttgaccagaagttcgtgttcctgctcatgagcttggtgatcttcactgtttgtatgagaccgaagggtctgtgcgccgtgcgattgctggatgtggagtttttcttggcctcggaaaggctcgagatagtcgccatcaccagtccaccggccccatcgaccttacgacagtcgcctctttttattcggtttgtagtggtttcgcatcggcccaattcgtgctctcgtgcactaaagccacctcctccgtgcgcatgcgtgggcgtccagctgtgagtcatttgaagagttgatactaagactccacagctcaatgctgtaccaaaccgtgctgctactgctgctggccttgtggctgggcgggacccaggccaatgaggaggtggtcgccgccagctcgtcctcggagtgctgcagctcgtgcatcggcaagacggcctccgtcccgtacaactacgaccccgtcgtcttcactcagtgcacggccgtgtcgggcggcgtgtgctgcttcgactgcggcgagatcggcgacccgcagtacggggacacggtctcgtacggatccgacggcgtcactgccgtggtcaaggccggaacgtacgtctccttcacatggagcaacgtcgtcaatgtaacgtacatctcgctcaagactgggcagaagaagacgcaaacccccaagatttcggacgcagcggcgaccgagaagtccagcaccttcctcatctgcgccaaggcggcgggcaccatctacttccgagggtggggcagcgactcctgtcgagaggcgtcccaggagtacaatgtgactgtcgaggctggagactccagcgctaccacctgcgatgccaacgacgtgaaggtacccacagcgtcgagttctggggggtctggcagctcaggcgacgccaaggctggatcgggtccgaaggacgagacggtggacacttgcaacgcccagcgagcgagtgtgcagactgtggacggcgtgcggacttgcgtgtgcgtgtccgactggactaacccgcccgagtgcgaccggtggccgacgtggaagtggctcgtgacgatcggaggagcgttggcgacggtgtgctccattatcatgtccgtgcgcgcgttcctccagagccgcaagaagaagcaggaggaggcggaccacctcgacaacttgaaccagaagaagtacgaggaagaatacccgaggaacaatgacgacgagtaccgagagaatctggcgcccatgggaaccaagagcgacgtcgaccccgcggatttaacacccgctgctgaataccagaagcacgacccggaggtgcaacgcacgcctgggggcacgcgaaaacccgacgaacgcttgttctcgctctgaaaagagcacaacgagttctaaacaattcctacctaagattttatagcgctgccaaactagcgcgactcgagtaagaacacgaattccctttctgctcgacattatttcccccagcaatcaggtgcaccaggttctttgatccctttgactccacttgacaaagcgctgctcaccgaaactggatcggcttcggacggacgatcaccaacacgaattgacacaattcacaacgcggaaatcccctccagagagagagagctcactgtagtgctctctacttttattaatgcattaggcgttcgatgggggtattcgtgagtcagctgcagtgccagtcttgtgggttagtttcctttaagctggcacgatcaagacactgcttcagtacctgacattttataattatttgtagaccccttggccgtaagcgaagcagtgtgcaccgcgatattccgcgacgtcgtcgtatgtgggtcacccctgggtgaacgtctgctggatgggttgtaggatcgaagtggatgttgataacttatcaaagattcgaatttgaatcatggatgcccatgactgcaaaccaacagcgcatcaactgctacatatgtaaacgagaatgacctcgcggcctccgtcccgtgtcttagatgtagtgcatgggagctcgatgcaaaagcaagaatccagaatgcaaaagtgcaaatttacgtgatgctccctatctgtatagtatacactatacactatgtatagttgctctacaaatgtcgttgttgcaaatcaaaggatacttgagagtttggcaagattcgtcggcgtagctgcttgtgatcttggcgcgccacatactaactactatcgtattggcagtgctaatttagcattgctgaatagcaagcttttcatttgtttttccgatactggttcccaaaagtctaccatgaacccataagcattaaaaccatgtttagaaaaaaaagtgggctcgctccctacacttctcttagcacaatgcaaatgcgagcgcgcttgcaatcgccatcatagctgttgacggcaacaacgttgccactgctgaattcacagtcgaccctgaactggaagacgcggaggcgtcggaccgcagtgacgaagccgtcgactcgcccgaactggtagatgagtcgccaacatccgccatggaattcgacgaacccgacaacgaacttccgagcgtagcaccggccgtcgacgagctgcccgccaactgtggagtagaggacgatgacgcgtccgcaccattagtcgacgagctcgagttggtgttcggagccgtcgttgcgccgttaggggaggaccccgaggtggtattaccagcagatcccgaggtcgtacttgaaccagtcgcggcggttgatcccgaagcagccgtcgatgcaacgccagtggctgaaccagcgcttgacgccaaggcggaaccggtggtggacgatcctgggcacaccatggtctcgccactgcacattgctccggtagagcagtcgctcagcgtgtactggcagctcgtcgagcacagctgcgcagtgaccgaggtgtccgtggtgcaggagcagctctggccgcactccgacatgctgttggcatctccgacgcggttgcacagcgtgttgcagtcttcagaggtggaagcccctcccgtcgaagtgcagatgcggcgagcgcagttgccttgtgtcgactggaggaaacgcgccgtggagctctcgacagggacagtcgcaagcagcaggctcaggacgacagaaaaggtgcggaccattgtagccaagtggaaaagcttggtaagtataggacgacgatgtatcgcttgcgatggaaattggaaagtgaggcacttcaggaagatctctttcggcggggacaagcagctggagcgcgcgtctctatcgatcggctggacgtcgttgctgtatcttggcagccgtgcgagcgcatatgatatcctatgcccctttggccaagcattgcgcgccgaaaaagtgttgttgtgaggtttattacgtccagatgtgttcatctcgagtgattttggtgggttccacgtggcttcacagaccagaaggagccatgtttcgctcggcttcgacttgctcctgcacatttccttttgactccataccgacggtgaagctgtgaccggaaacagtattattaatatattggggaacgccatgcgcatgataagatttcgctggacgaggatccatgatgggcaggtgcagttttacctttttttcaaacatgcaacctatgacggcttcatccaatacgcatgccgcgaacacgcgtcgaactatccagcattgccaatattttgcctccacgacgcttatcccagaagccttaattttaccaccccgatagcattcgttcatcttgtctgctcggcatgaagactcaaaatggattgcggtgaatgacaaacacagcttgcaaatctgcaagatgcagcttgtccaagcgaagcagaaagccgagacgcatcgtgcccatcattcggtatgcccacctttagatagagtacagacaacgacttacaaagccggcatgcttaatgccatcctcctatataaaaacaacgataaattccctcccgtcaaatctgtaaaactgtcataaaacacacggcgtgttgcataaagtacacaagaaagcatataaagtacacacaaccagatggtatacaaagatgaagtcattcgattgaatctgattggctggtttgcttatgttaagctttgcttgacttcgtctgccggctttttgtgtctgccggctttgtaagtcgttgtctgtacgtgcgcatgctgtcgatgatagcaatacaaaccatgtcgtttgttctccatatataatttttatacccgatgaggtaaaacgggtactcagtgtttcaggcgaatgagctctaacttgggttttcaaagctggagcacctgcgaagttccataataataagcctaacgcaaaagaacaagataagtctatcgtgccaacacaatttgacttctgcacacttgtctttcgggtgtatggacagcgggagttacgttattatagcagcaggctgcaataggtaaatgaaaatgaaaaagtggtgcgtggcatataaccaagaggaccaaaagtgatattaatgaagtacgtaatgcgcgcgcttcctcaagcgctggttgcgcacgttatcccgtttttcagtgacctgcactagcgacacgccattttttttacttggtgccgccttcagtcttagaagtccctctggcgactaatttgatacatccaatgagaagaatgacaagctgctactctccctacgacccagtaggtttggcactgcaggcaacttcgtgatcgccaagattattgttaccgtgatgtgttgacgcatgcgacacatctttgcagctcactgcacggcctcaattcccatgatcacccgacttggacctttaccgccaaaggcaaccgcaggcaacgcactaaaactcagtgcatttgtctgttcacgtgactactctatcgccgcagttgattgaccttaccgaagttgagttgcatgctacttgccattgatcgcctctgaccatctcaggcagactgaagtgttgattttcaaggtagcgctcgtgctatgctcatcggtgcaaacttctccgccctccgacacaataaatgtacggccgactgcttgccgaaccggttgaagcaaggtgcatcgtaacttgcttcgcttgacgtagactgtcaacgaagtcttgcaaataggtacgtggaagcgagccagtgcaatgcctgcccatcgcttcattatcttacagtgattcgatctcatcttctacatgacgtgccctattaaaaagtacaatgaaaaccaattttggagtaaattaaaaacgtaactttttaaatagctgaatgcattttcatcgtatattacgttatacaggtttctggaagtaaattgtactactgtacttcttgttcctagaaacaataccctgtgtgaagcgacgtgttgaatggttcaaattacagggcttttgcatggaactgcaacttggaacttgataccgcccgcggtaaaattcgtaaagtcgacagacatccatacagccccaaaagaacgttgcaactgacgacattactgcatacgtgacaagcacaatgcataaacttctcttcaccttcctggttctcaacgctgcgtaagcaacacaaaacatttatcaaggacgagaagaaccattttaatattggcgacctctcctcacctctgccacctgatttcttagatgtgcacgtgcatgtcaccacgactcgaaacgtgctgacagttgccgaccgggcaacgtcctcgccgccgttgaaaaataaggataatacaattcgagcgcgcggcatcggcgcgtctggctgtatgtttctgcctctgttcatttcccacttccgagcatcctgtcctcgagccatcttctccgcaatgaaaaaaaagatggatcgatgctgtatcctgcaacagtcttttgggcgtcgctttccagttctttccccatcccaaccggtggtctggagcgcttgcctcgccctttacccggagtcgtaatcgtacttaggcgagctcgaaaggctttgaaaactaagaaaaacctaacaatacaaacggcgtacccccctctgtaccggcctcactcccagattcgcctccatcgtgcgacttgtcctcggttatacaaccgcggataatgatggcgctatcacagcgaccctcccgcaaggccaaacgaacggacgtggactacgccgttctgtcctcgggccaacagatccccgagtattccaccgaggaggaggacgactcggcggacgaaagttacggctcgacctacaagaagaagcgccgcaaacagtcgacccagtgctttatctgccaccgaccgccgcgcacctaccgaaacaccatgctgcaatgcgacagctgttccaggctgtaaggcagtcaagtcttatttagaacctaccttaccttatcttaccttaccatttgcacaaagttcactaaaagataattcttatattcttcttttgtgtttctctttatgcactcccaggtaccacgcagcctgtggcaagccgttccagtcagcttctatcctgggcaacacgagttgctacgagtgtctccaggaggccaaggtggactcgttgagtgctcttcctcgcaagacgctggactccatcgcggactttgtcaaggtgctcaagaaggccaagaagatcgtcgtcatcgccggggcaggcatcagcgtctcctgcggtatcccggacttccgctccaaagacggaatctacgccatggctcgcaaaatggacgtcgtgctgcccgagcccgagtgtctgttccagatcgactacttccgagacgacccggcccctttcttcgaggtggtgcgcagcgccttctccaactcaccgaagccgtcgcccacccactggttcttaaagctgctgcaggacaagaagaagttgctgcgagtgtacacgcagaatattgacggactggaggaagcggccggagtcacgaggagtatcccgtgccacggcagctttgcctattcggcgtgcatgcgctgcaagaagcgcgtgcccacgagcacgttgatgcctgttatccaggcaggcatcatcccgacgtgctccgagccgaactgtcgcggcgtgctgaagcctgaaattacgttttttggggaaattctggacgataaagtgagcacaaccatcaccaaggaccgcttgaaggccgacctgcttctcgttatgggcacgtcgctcaaggtcgcgcctgtgatggagatcccgggctatctgcctgcccacatcccccaagtggtgatcaacaagacggcgctcaagaagaaaaagttgaaatcgaaaaaaatctcggctgggaaaatcaaccgggtaagtagtaataagacggacgaggactcggcgtcggatgaagaggagttcgatatgtcgctcttgggggattgcgacgacatcatccggtacatttgcgcccaagcggggtggaagctggacccggaggcggttaacgcggcgaagaacaaacccatggtgcataccagtcagatcatttcgcacaaggacgcgattggcaagcaggtttattgctttggtgagtgtcagtgcaagaacaaactggctgctggtatgaacgacgacgatgacgaagtcgaaggagaagaacaagaagaagaagagggggaggaggtggagcttggcgacgagattgtctggtacgtcttgatgctcgtattcttggcaggatttattttgcctaatgtggtgctattcgcattatttattatttttcagcaatcgttgcgaggagaggattgatcccgatgcggagcctggtacgggcgtcaagactgttcactaccgctgcaagtaagttgcttcaagcaattattttctcggatgagggagtcattgttgacaagacgttctgacttgtgttgttgatgtgcgcgcagcgactgctttgactacgatttgtgtggagattgctaccccaagaggcgatacaagcacaaggggggcaaacatcggttcacgcagtgcttatagagggtcgacattttccttgcgaaacgagaccactattatgctgatggccaagacgataagtagacagttcgaatggctttcagtgaggtttattaatgctgaacgtgaacccgagtattcctgcgagtgtatgatcaggctagctgcaatgtgtgcacggcaagtcttaattctgcaaagaacagagctactactacgtagtagttgcgattgcaatttcgccagccattggggtgtctgaaggcgcgcgacttgtgaccggtcgaagctgtgccgttttaagaatgtgttcggtgacaaggtgagttgccagtatgcagtcaagttggctgcattaatcgccctcacgcgctgcataggagcacgctcgggcgctttgcaacatttccggacgagttggctggcaagtccacctcattcgagtagatgcctcgaagacctcacgccacctgcaagtaaagaagctagcggcatcggctccccccccctgcgatggcgcctccaaccttcagcactttgtatctgtgcgtccactcggcgcagaacgcacagatgaagtcacgctacgcgtactgcaaagtcttcgtggcggacaagccaatggtggagaatacgatgtttgctgctttctcgagtacgcactcccagtccttcaagactctcactgctcctgtggataacaacggaccagtctggaaggcgaagttcgaagtgcacaccatcgatccccgagtcgacgtgttatctgttctcgtgaagaacccgcagttgctgtcctgcccaattgttggagtttgtgtgatcgctctgaagaacctcatcggtgctggacgtgtggatcactggttggcgctgcgcaagggccgaatccaagcaggtcagatccgactacaattgctgttggagaaggttgagaacccctccatttcacctcggccagagtattctcaaaaccaggttcgctcgcctgtaccatctcatcaagcgcaaaccaaccgtgaaactttggtggaggatgtctatcgacgcattaagagagagaagcaagaacgcgaagaatcagagagaaggcaacgtagatacgatgatctacgagctgcgattcgagaagttgatggtggcaatgaacaagaccgcaagagaaaatcgagtagcgacaaccaagccgacactttctgcggagcactcgtatacgatgtcgatcaagttcgattcgatagtgaagacgaggagaagctcatgcgatcagaacactccgagagaagcgagggcaatcagtcgtgctgcagtcagggctcgtccaagcgaggcagccgtcggtatcagcgccaaagccgtgaatcgtgctcagctcggtctcaaacactcggtatggaaagacgtgacctcgacgaggatctttacggccacctcccaggatctgatcgagcgtaccaatactacgttcatggcaggcgttgggtgggcacaggctcaagttgatgaaccccagtgcggcagtctttgcttactgacttcacttcaacccagatgcaccacacaagctcaatactgtgcttcgaagtacacaacacaaggtcgcagtcaccagacacagagtcatcttactacatgtagaagaatcttctgcaagggacgcttagcttaaacttcataaagacatgtgtgcaggtgcacttcatattaacgattaaaagcaaaaggagcgcgtcagttccgcgttggtctgcccttgctccttcgtagcttggccaagatattggggctggtctggctcaccgaagctgacaccatcggggccataaatgttgctgttgttgacatacgccgcatctccgcctttgccctccatactgatcttggcagctcgagttatttgacccatcggctgtgcaacatcagctcgctccggagcccagtgctgcgccaaacacgaggaagagttggaatcaatggcccgcgagtcgtcatcgtagctaagcttgtgctgatagtccatacctgacgtccgcgtcgacgcgcgcgagtctccgctttcattcagcatagctcgggccttggctttcttcgactcgctcttcttcagcttgcgccgaagacgctcctcctctgacgacgataatggcgaagaaagagaggaagaggagaacaccgacgatgacgaatagctgctttcgtagttccgtcgagatttcgggtgctttcgcttcgagcggcgcttcttctccttctctcgcttcttggccttttcagctcggcgatgccgacggcggcggcggcggcgttcatcttctgaagatgaagaagacaaattttcgcccggttcactggttgggaacgtcaaggtgaccgggatattctcagtcgggtaggtctggttctggttgttttcttcgcttcgggaagaaacggagccctgaatcgatttcttcgtgatgaaattctcctccggcaccttgactctcgaggaactctttttcttgcgatatcccgccgaagacgccgagctcgaatccgaagaatcctcgccactgtagtctcgtcgcttggagtgttttttcgttttcttgctaacgttacgacgcttcttgttattttcgcggtctctacgacgacggcggcggatttcgtgctccgactcggtcgaatcggacgagtccgaggtgggcaacgcgttgtgcacaacttggtccaggtcttccaccgacaatcggatcgttccaaaactcgtcaactcgcggccaggtccattgccagtgtccacgccgtaaatggtataacccctaggaaccccaaacttggtctcaagcgcatccttcttctccaaatcctcccgcaagtttaattcttccatcaacttcgtcgcatccttctccttttccttcttcacccctcgatacttgaaactcggcggcagatccgaatccgaatcttcggcttgaacatatcgttgcttctcctccttctcctcctccatctttctcttctcacactgcagtctccacttctcctccctctccatctgctcttcaagccccacccgcttcatcgcatcgtcctccaactgcctccatctttcctgttgctcgcgctccaactctcgtcgttgggcctcctccagctcccgatgctgctgcatcagtctctgcaccatttcttcactcggctgggagtaccgccgcttgggctccggagtgaaattgttctcctgcagacagagctgcagtcggatctgtccgctggccttgtcgttcttgtagagggggacccactcgtccaccgtctgtccaagttgaagttgccgcaagtggacaacgcacgcgccgatagccggactgtataacagaacgtggttcttgacgcggatcgtcagcacttcggtgtttgggtccttcacgttcatctggaacttctcgttccactcggggcagtccctcgcggcgcttgactggactttagtatggaacgtctggtggctgctgccgagattcttcttcttcttcttgtcgtggccccccacgagggacttgccctggccgaagccgccgaccatgggcgagtcccccagatacagtttgcagtacgagctctgggccaccgccggcagcccgcgcgccgagtgcacgcgcaggtagagcgtgaagttgccgaagagcgggcggatggccgacgtgctgactggccgctggtgggagctattgggcgccgatgactggtcggacgaggaccgggccatcgacggcttgaaccccagcgccgtcgtgaacgctcggaagcgagacgtcgctggcggagctggcgctggcggcgtgcgctcgttccccatgggcagattgaagagtgacgacgtctgtgttgcttcgagcccgtcgaccaaggtactgaacccacaacagaataggttcaactttgcggtagagggacctttgtgcagcgatatgcgcggcgttactgctgagcgagggctgcatggagcacttcaaggcttcaagcctgcagctgctggatcggcgcggcgtcttgcccggcaagttagcagcaaaacaatattcaccacgatggtcggaactcgaatagatcgagttccgaccatcgtggtgagtattgttcttcctgaaaaatgcattgcgccacttctagccattctttttattgcatcgtacagaacggaactccatgcgcaactattatagtcccaactcgcttgaagacaatggaagaattgctttcaataaagaaaagagaaaatattatacatgcagattcgatcaaggacctgccgttcttcttattgccgtatttagacaccaaaacaggatgaatagtggttaaacttttttaagttaaataaactaagcccgtcgcgtgactgtcgggcattcatctttgtagagttttcaactcgccgagcaatataccaccactacactgcagtgtgactagtacacgtagtacacatctgcagctcttcgtacacttccgtagaatttcactgaccaacaggacatcttttgcaaattcatccatgcattcattactattttctggcttaaagtatctgatcaaggtagcctccctctttggccaactcatagaagaccccgcttccacctttcaccaagttgcgagggctgtcgaactccaccactttcccgtcgctcagcaccaggatccgatccgagtcgagcaccgtgcccagtcgatgagcgatcgtcagtcctggaaatccttcttgatcatctcctgcagcttcttctcggtcgcgtggtcgatggacgctgtggcctcgtccatcaccacaatgcggctccgggtcagcagcgcgcgagccatgcacagcatctgccgctccccgacgctgaagttctcgccgttctcgctcagctcgtacgccaactgcccctccagagccgacacctgcgtcttcatgtccaccttctccagcgcgctccaaatgtcggcgtccgtgaactcgtcaaaagggtccatgtacgcacgcagcgagcccttgaacagaacaggcgactgcggaatgatggacaggtgcgagcgcagtgtacgcagcggcattgatgcaatgtccacaccgtcaataataattcttccagacatagtgaggctggacttgcctgcaccagtacgcccgacaatgccgatcttctcgttgttgcggatgtcaaaggtcaaacccttgagcacggggctcccgccctgcttgtagctgaagaccacatcctggaactggacggtggacgaacgaggccatgaagcatcaggctcaatgacaagcggtcgcttgcttccttcagctgggatcgacccgtactcgagaatgcgctcggggctgaccatttggatctcgacccaggaccacgactgcaccagatcagcgagaccagtgtcgacgctgagcgcgtacgtgaaggcaagtccaacgataccaggagacaggaagtcgcgcagatacaccaatccagacaccacgagaacaatcacagcgctgcctagaagctgcatgcgaagaccaaaccactgctgcgtgacggtgtctgccagccagcacctgctgttcaggtcgttgcggatgaagttctcggtgatcattcgatcgatggtgtctcgaccgaaagcgcgaataaccacgaccccttcctctgactggctcacgtggctgagcaccggagaagacgacactttccacaagcgtgacagttctcgagacggagcgaggtagaagttggcgatcttcacgtacatccacacgagagggatgatcaaagcaccgaggaagttcatcgtatacacagccgtcgcaagttgacacactgtgaagaagaacatggcgaggaaacctccaaacgcaggagggatcatggaatccacagccgccatgtcgtcgccgtaccggttcacaatgcggccaatggggttggcgtcgaagaagcggagcggggccctcaatagcgattgagtcatgttgtcaaacaagtggcgagacgcccggagaccaacaatcgccacggttgtggagcggacgaacaccatgacagcagcaccggccccaagcaacgagtagaccttcatgttgtacgctgtctcgtcttggttgtacgagccgttcttctgtccggtccagcggctcagccacaagtcacttccgatctggaaagcctgccacagcgtctgcaccgcaaagaggaagacgcagaccttgacaccgccgagcgagttgaaatagttggagaacacctccttggacacgcgaccttcttcacgttcttcatcgttaaccagccgacccgcatccttgtccttgttgttgttgttgcctttttcatcgtcgtcctttgtcgagcgaggagacactggtagcgtgtaggagcagcgtggtaacgcaacttcatgtcgagtagcagtcaacttgccgctttccaccagcaccttcacgttcgcagctttgctcgcaatgatgtcggcgccgtgggtcaccaggatcacagtcttgtccgcgagcaagttacagatgcagtcgccaaagatctgactctgcacgatggcgtcgacagcagcgagaggcgagtcaagtagcagagtatcggcgtccgagtagcatgctcgagcgaggcagacacgagccttctgtccccctgaaaggttgactcccttttgaccaatctccgtttcgtcacctcctgggaactgcttcaggtccggcactaaaccacaggccgcgatcacgcgcgcgtacttctccttgtcgtacggcagtccgaagaggatattgtcacggatggtcatgttctgaatccacgtctgttgtgagtagtaggcgacgctgcctcggacgaacactttaccgcccaatttgttcatctctcccagtatcgcggagcacagcgaggacttgccgctgccaaccgatccgtgcacaatgaccaggtcacctcgcttcacagtgagcttcacgtcggttagtagcgctgtctcgtccgtccagccaaaggagccgtcttcgatagccaaggcgacatcttgtggctgcgcagggtcatcacgtgtgacgttgttcgggtcgaactcatccaaagcgaggtagtccgtgaatcggtcgatggagatcttggcctggatgcaagcttggatggcggtgggcaagtctctcagcgggtcacggatggcgttaaacagagcgatggcagtgaaaactttcgcagcagtcagcgccttctccatcacaagcgcgtacacggcgaacgacacggccgagaccaccaacggagagccccacagcacgaaaatgttgagcgcattaaggtacacgtacttcttgatagcggagagctccgtggcgcgcaacttgtggattttgtctgcgaatttgtcctcccacgcgttcaatttcacgatctgaatggcgctgaagacctccttgatggtcttcatgcggttgtccttgtgctgcatgaccccttcgaacgtgtcgccggagagtttggcgatgatagagcccgctacgatcgaggcgacgatgacccccagtccggcaaaggcagcgacgccgatgacttcgtacagcatgaagaccacaaccacgatctggatgggggtgatccacacgctgtagctcatgaacgccgcccagagcacgttgtccacgtccgacgagaagaggttggagatgtccacggcgttggagtcgcctttgctctggatgctgcgacgcatggccttcctgaagagcagccccttgagcgacaccgtcaggcggagcgcgatcaactcgatgtggaactgcacgtggggcagcatgatggcgttcacaagacgtgaggcgaagaacacgccgagccacaggcccaagtcgtacatgtcgatcgtcgcggccgcgaatgcagtcacgacgtggttcagaaccgcaggagcgaagacgctgcacgcggtggagaagagcgtcgccagagcgcatagcaggaaggggcccccgtacgtggtggccatggccttgatgatggacttgtcatggctctcgtagtgcctcacgaactcgtcgaacaccgtagctgactggttgtcgcggtcgagctcccacaggtcgtcgttgtcgagctggcgcgtgttgcccgtgctcatcatggggttggcgaacgagaacaagacgcgcgaccacaaggacgcagagcctggggtgataacgttagttgacgttgttgcatggtgcagctgatgcttggtctcttctacttggtcgttgacgctggtgaacgttgagtgagtaccgcggctgcttggtctcttgagcgggggagatgagataattcgagagtgggtggctgcagtcagggatacagtaaagcgctggctgccatgctgcagcagtggatgtataacccactgccacgtaagcttagcggtcagctggtcgtctccgccttgactgagtcttgaacgatttcgtacatgtatacaccgtagcgtgatcattgttgtgtcgaagcatgagcaagactctcgacaagagttgctgtagtaatgctgtggctattgaaagtgagtcaacaacaacaacaagtcgctgtttattttttgccgtttccagtgggggtgaaatgggcagcacttggagttccggcagcttcttgctcccccactcgcggtcggcgttgacctcccagctccaaatcaaagacgtgttggctctgtgtgaggatggcgacctgcttcttacgcgtgaaaaactcgccgactcggcgttgcgtgtgggggtggagtttgtcgtggctcgggacattcaacgcatgcagcgcgggcagtttccgtctcagcgcgtgacgtccttgccccgtacgttgcgttacgtatcttcggtctggtgctggctcattgaggctaactcgctctgctcgcccatcagcgtggaccaggtgacttcaactccgtgtcaaccaacggtggtgaaactctgacgcatgttgctctctttcgatgctagctgcgagctgctgctgcgccacgaaggagctttgcgcgtcgtcgcggtcaacgcaaacgggttggagctcgtcccattcgaagagcgagttgcgagcaaactacctcacatccacgatcgtgtaagtccactacaaggaaatcattattctatgccgggtttggtgctaatcggtaccttgcagtacgcaattcgccgtctccgatatgacgcgcgtagtgagagtctttcctcggcgctgcgagatttggcgctgcagattgcatcggtagccccgatttcatggcactcgctgttgttccctgacgcggcggtgaaaatttctccaagatccccaaggtctccacggcagcagccagtagatcataacgcagtcgtaaatgctctgaaggtgctaccaccgctgctgcggcaattgctacgacggacgttagaggtacggttttcctttcattaagtaggacggttattcattaggctaagcgttcaaatgatagctcttgtgccagaaattgaagcgcgagtcgccgctgtctgacgcccaaccaacagagcacaacaacctggatgcgtcaaaaccagagaaccaagctactgctgctgagtttcgcattgccttcgaaactctaggggtcgccgaattcacctctcgcctaagcgctgcatttgtagctgcagtgtacgagcacgttcagctcctggacccgatcacttgtggtactaggaatgagcctctcgcccctgcggccttttggtcagccagcaacgacagtgtgcgcatcgccctcaatcctcctactgctctggggcttgagatggctctcacccgaccaaattgaagcgttcaagtggacaacacggattcattagcaaaacgagtggctggagacgccagcgacaggtagaggactcggcgtgtgagtctaaaaacgacataaatattcaaatactcattcgacgatatgctaaactaccaagacggccggatctgatggcgaacttgctgacgtccttcagaattacatggttacctcataacaagacttagttcaaacgaaaatgagatgtatagtagcaacatttatacgaaaatgtgaaactaaaccaaagattaaccttgcactacgatggttggtttgggtgtcatgactcaagctatgcagtcctcatacgttttactccactattacgtggaagaaggtcgacacgccgatcccaggtccaattgctggcgaaatgaacctgctcgtagtagcccacgtacacttcatctggacacgcgcttagcgccgctccgacttcgggagatggtgtcaacacaaactcctcacacgctgctaggctcgaacacacagcgatgtaaatcggtggatcgtgaactccggcttgcttgacattatctgggaagaaaatcgagttcaggctcttcagtcgagttttgctgatcgtgtggttctggccgtcaacaatttgcaggtacgccacgttgctcttcttcttcttctctggtatagattggattttggaaatgccgtcgatgttggggaagtcgtcgcaatcagggacccagtacgacgtgaatggattatcctttcactccctcagactgctttcgtagtcgattgctgtgcccgaacgcaccgctaccccttttcgcaaggacaaccgcttcatatccaggtgaggctgatcgtctgttctagctatcggcgggtcatacttggatatgcgaagtctaagtcgattctcggcagcgaggctttgaatataaagtctaagagcgcttgcagctagtgatgcgtactcgtatccagctccttgtgcccaggtgtagattcgatgcaggtcgtctgaattcagcctccagcaaagattacggagcgcatattccgagtcgatgacttgctcccaataccgtgaactggtgaattgagatatatcccttgcaaatgtgcggcgtagatgaccatattgtgattttccagacaaaatcgaaccctcgggaaatacgagcggtggcaacttcagcggcctaccgataccggtaacgttttcgatgcgacggcgtatatcgtctggtgaagtcacgcactttgccaccaaagtagtaaaatctaatctccatttcgtccggttcaataccgtgtatcaacttgccaacgaaaagatacccctctttgaccagctaggcagcagacagcaatacgtacaactgcctcttgcgacgtgaggggctaagcaaaatacaatacgatattgattggactcttcaacgttccgcaattaataattgggttattttctaatttttccccactaatgtagccacaaactcaagtgtagttaaaaagagttaaacacaaaggcgagaagaacagaagtgtctaactcatgtggatagtttacttcggttacccatgatcgtacaccatatgaaacaattggcgggaacccgggtacccatcgggaccccggtttccccaaaactaccggtacccatgtatgatcaaatgtattggagtgttgttctatgacctacgttgaacgtagcttaagctcggtagagaaacggaaggtgaattcgtctttgctcccgtcctgtgtctctcatgaaaatccagactcttgcctggtacagcggtagagggctttccggccacattgctaacctcctgctcacgtaaggtggactttgacatggtaaggtacgttattcaggtctactcagtaccggtggcacattagttggaactctttcatcgagtttgatggtttaacttgccccaacggtaccaatatggtggccgaaattttaaataaataaatcgcgatttggtcggtatcatttgcgggttcccgcctatggtttcatatgctacgctaaccaaagcatgccttagattccatgcacctgtaattcgatacaaacctcacaagggttcgaagtttttgttttagtataacgcattctagtacaattgagctctatttctgtaagattttcacagcaaaagtaagttgcaacggcttcttattagtatttttaaactcatcttgcacacggcgacggtaattggtgtgcagcacaccaattaccgtcgaattcatggggaagtgatcataccaagcacaagttgtatagatttctgacttcctagttcttattccacgaaattggtgacggggtatcagtaagttattcccgtaagttactgcgagttattcttacggatattggtatttaccgagccctggctccacgtgctgcgacgtcgctagcatgtcaaacgtctccaaactcccagggatttcattgtaagaaaacccatcgaacaagacccagatattcttcacgcctatttgacctatgagcgcttcgtagattctgctcactcgagactcggtcggcagcgggatcgaaaagtaggccactcggccatcatcgtgcgtcaggtagagcaggcaaacacatagtcctagcccaaaaaccttcgaaacaacagcacattcttcttgcgcttgagcacgaggtagaaagccatcacacacaacaaagtcgacttgccgattcccggagacccaaagacaatacccctcttgttctcaagagcgttagtattgccagcagtggacttccgaaaccacccatccgtgatcagcgacacgacctgcttgtcttccaagcgccaaaagatcttccccgtgtcggtgcatccgcccaactcgctcataaatttcgagatggttggaaccccaatcttctaatgagctgcattccgcatcaaacttctcctggtctcaaaggcgttgtgaaaggtatcactgggtcccccttcggcacttccacgataagcgcatccttcactgaaccacacttttcgcgccattgcttcctctgtactcgagtcgtggagcgcattttggtggaatgtgaccacatcactcaccaatcaagtcctgaaaggtgtcaacgacgtcctcatcttcaatacactgttttctgctggttgtactacgacacacataaatgtttgccctctatgcgggggtaacagtttataaggacgaaaatggagctcgaagtgaaggtggaggcgccagctgggactcggtgtagcctgagcgccgatgcctttgcgtcgcgtgtggatggacctgcgtatcgtgaagatagcgcactgttcgctgacaatgcggtggcgtccgaatccccccacggcgcgcaggatctcacgacgaaggtggtgttcctcactgtgaacgacgtctacgagctgttcccggacgccaatggcgttgggggcgttgccgaactcgctacaatgctgaaagtcacaaggcaaaagattgatcgcgatactcacgtgatcgtcacactgaatggggacttcctgtggaggtcggagctggatcggaaggacaaagggtgcgtcacagttatctccagtgcgagcttggaagagtattaacctttgcagtgttgatactctcctgcagagctgttatggtcgagttgctgaacaaagtcggtatcgagtacgtggtgctgggcaaccacgagttcgattttggcgccgaacacatgcgcgagttgctcgccggcgctaatttcaagtgcttcgggtcgaatgctaggactgctgccagtggcgagttgtatccgggtctcgtggatacgtgggtggttccgttgagcaatgggcttcggctgggtctgtttggggttctgacgactgtcactgggaaggacccatttgctggacccagcgttgtttttgaagacgagagacctcacgcgcgtcgctgtgttgaggaactgaaggcgcagggagcagacgtcatcgtggcgctgacccatttcaaggttgcggacgatgtgcgacttgccatgcaggtgccgggtatcaatctcatcctgggaggccacgatcactttccagtgacctgcgcttctggcgtcgacacgctgattcacaagtcaggcatggatgctctttggctgggggccgtggagatgacgttgaccacaccgaagatatctcgccaggttcagacccacaagtctgaggtccgagtgggtttccagtggcaaatgcttttgaatcgtggatatcaagccgatccagaatgcctcgcgcttctgaacaagtacgtaatggacgttgagcgggaggagctagcgcaaggaaaactaacaccactggcgacggcaggcacagcgttggatggacgacgcgtcacgtgccgcacgcaagagagcaacatgggcaacctcgtagcagactctctgcgtgaaggactgggagctgatatcgggcttgtgaacgcaggctacattaaaggagacaagctgaacgagcctggacttgccattacgcgcaagtggcttgagaaatatcttcccctagtgaagcctactgtggttgtggagttatctattcgcgaactgaaggacgcgcttgcctactggttgcgccgataccctgcgatgagctcgtcgcagccacatttctctggtctccgtgttgtatatgacagcacagacaccacgaaacctacgataacctcgattcgactggcgaaggaaaactatgaagttgctgcagaatattcgcaaggcgaaggcaccggcgaacaagcggatacacccacggatcgcttggtatccgtcgcgatgcccttgctgagtagcatggatgggtggcatttcttcgcaagcgctcgccatttgagatcgggtcctcttgtgcgtgacctggttgaaaagtttgtcatccagagaccgcagattgattatccagcgaaagaaggtcgtcttcgcctcctcgagtcgattcaggccaagccaagcttccccaaaccatccgcattgtaacgctgctggcttctcatctcctattgtaaagcttagtttcagtagcgatggcaacgataacatgtgtccgtcacccggtaaattgaacaccatttcgtgatttcaccgtccacagagagtgacggcactcctagctagaaacgaaactctatccctgatgcttgagcgtagctgccatgttatcatgctgcagcctgcagcctatccgcgagcattttcacaaagcggtgctcctttccctgagtaatctggagaatacgcctcgcctcggtcaggtattcggacgacttcgccttgctgttctcagggccggttcctacctgggccagctgagcatacagatcgccgagggtgaacaagtggagccccgtcatcgggtggttggcgttgtatacgcgttggtagaactccagcattttctccccgtaaacaaccgcttcctctacgctgccacgctccatttccgcactaaagatcgtagccagcgtctgcaaccgcgcaatgctgtcgcggtggagaatgttgctctggcgctcggccaacttctgcagtgcgtcgatgcattgctgctgctggtccgcaaggtcagtactgacagaagcaacatcggtggcgtcgctgacttccttgagcgcacgctccacctcgtccttacgctcctgagaccactgctccttagggacgccgtcgatatcagcatcgaggaaagcatccaggctgccagactcctgcagaggcaccgagcagcgactgcaggcacagttgaagtggtacttgcgctgcagccgctcgtgtctctcacggcgaggcagcgcgacatcgactgcaacaaagcctacgtcagaaaaaaaacagcagcgcactttacgttcaagcagccgcaccgtaggtctgtgtgatctcctcgccagccttgatgggcctcatggcccggaactccatttcgagagtcttggggacaaacctgcggcaaacaaatccatcgacagcgtaagcaaaccaactgtaacagataatcaaaatacgccgccatcccacttacgtgatggcacagttcgggtcgcagctgtggttgatcatcgcgcccagcgggaagcagcctgcgccctgctccagcagcagctcgtcgcagatggagaagttgttgttgcggaagcggctcagcatgcgcagcatctcgtccatcgagtacgagcctgccccaaaaatcaaacaaaacaaccccatcagccctccaaaataccacacaaccccctctcctctgcctcctcaccatccaccaactccagcttctgcgccagcgccgcgagcagcatgagctcctggtcctccatgtcctcctcgtaccacacgagctccttgggctgcagcccttctgcgtcctcgcgcctcagcacgcggccgagcagcagcacgtccgcggtctggtcgttcctgagcccgagctgcgccagctgcgccaggaccttgcactccttgcggtggtcgggcttccagtccgcctgctggcacgccttggagcctgcagcagcgcaacggcgtcagcacccgatacatttagccaatcaaacagcagcgcactcgggacgcacagtagaaggccgtgttgcagcgcccgcagcggctcaggcgcgtgcccgaggcgaagcacttgtggcagtgcgagtcccagagcgccggcagcagcacggtggcgagcgccggggcacgcagcgccaggtcgccggcggccagagccgtctcggtctcgacgcgccgcccgcggtcccccgagacgtcctccggggcgtccaccgcgccgacggtgcgcatcttggtggccagtgttgcaatggtgaacatcttttggtgtcgcgcgaacacgagcgaccttcgcgcgacatttcgacagaaaagcccggcgccctgctctcgcacttaaggcgggcgatacaaaacgccagtctaatcccgtaaaacgcgagggccgtccgcgttcgccctattcttatttccccccgagcgagtgaccatcactcttgttctccattctcgcggggtggaaggaagagcctcgacagccccagcaacagtcgcccgacggctctcgtcggcctgcgacctgcggcccgcggactgcgccgcgccccggaaaactatcatctgcgcggccctatctccgtcccaggcgactcccgcgtgtcgaactgccctctggccgccgctaacccgaggtaagaatctggtaaattaccgaggggggcgcctccgtcgcagcgctcccgaagctccggagcgccccaggaccctcggagcaggccacgaagcccgaataagccccggtgggctcttttgacggcttctcggggccatttccgagctccggaagggactcgacttgcgggtcaaagtaaattaccgtgatggcggtaatttattttttgacacggttcctggcggcctgcagagcctccgagcagagaagatatgttactgagtgtgtgcatgaactaactggcgcggttgtgtttgtggattgttgctggtgttgcaggaattcgctctagagctgaggactcggaggcggtcgggtatctacggcttttaggggactttggagcttggaaacagctagaaaaccttcggtggagcaaggcaatcgtcgctgctgaaggagagcgtgctgcagctgccgggagcagactcgcgagacggtgtaactagcccatgtccgttccccagcaatctatgccccctgtttctcagtatgcaccaaagccgacagtagctggtcattctgaatccactacgactacaccagcgagcagcgtacgttgcatcgttgcgtgttgcaactgtcctgacatgcaaaggattggagacctaacgacggtgttcggatgcgtgtctgcgacgtgtgtggattgtggatcttgttggtattttgcaggcaatgaacccaagcacctcaggagctccagtttctacagcagcatctacacccagttcaagcgctgccatgaccgcaacaaacgcgagtaccgctgccaccccgactgcgacgaatccagcagttcctgcagtagcaacatcagcagcagcaccaacgccaactgcagctgctgctgcagcagcaggaggaggtattgtgggtgcaaccgttggagcgacagcagattggagggataaagatgccgatcgaggcgcaagacagcaaattgcacggatcatgtgcgtacttgaaggggtttattctggttgggtgatatgattgactgaacgtgccgagctggttgtgatcgtgtacagcttgacattgataatgaagagtgcgaacagaccgacatccgcgaattataacccgcgagaaattgcaaggcggctggagcacacgttgtatatgggagcaccttcaaaacaagagtacagcaatgtccaaactctgaaggcgcgacttcaacaagcattggataactcgaggcggcggcaaatgcagcagcaacaggcaaggttacaacagcaacagctccaatcgccaggtgcatctgcagatgctgttcagcaacaaactcaagctcagttgcttcagcagcggcaaatggcgctacttcagagacagcagcagcaacaaatggccgcagcgctgcacaaccaacgagctaatttccaagctgtgccgttccctggagcgtcagcgccgatgagccaggcctccgttaaccagccactccagatgcccgtgagcatgtcacaaatggcagtgaagacacctggatctatcgcgactgcaagtacgactccaggtaccgtgacttcatccaccaacaatggagctgcatgtgcttcgattttggacgagctggaacgtgaagcagatgaaatggcgaacggtgtgaacgaccagccactttcaatgcccgagtctgaactcaaggctgtgacaactccgactggtgcactgaatgctgcgaatggcaacaacttcgtgaatgttacgcccacagtggcttcgccaactgtagttggaagcgtcgacgcgggtgcgtttaacgcagttccgctgagtatgcctcccgagatcagtgccagtatggcctctcctgcagcggggccatctgcggcgttggcgcaaccaactcctgcgatggttagtgccgctccaacgacttctactgccgctgcaactaatatgtatcacggcatgaatctaacggggccgcaaatccagcagattcagcagattcagcaaatgcagcagctcaggcggatgcagcagcttcaacagctccagcaacagcaattgaacggaaaagttagcgctgctcagctacaggctagtgcgactgtgccgaccagcggtacttcgacgacaccaacatctgcagcagctacgggaaatggagtcacgcctgggatgattcagatgaacgaagtgtcaattgctcagaagcgagaagaactcaagcgacgactgatccagttgaagcacgctcgaacttgtacaactggggaatgcacgatcgactactgcagtcgcacgaaggcgttgctgtcacatgtgtcacgatgcgcgaacgctcagtgcacaacgctcggatgcaaatcgacccgacaattgctttctcactttcgcaaatgccggaatctgcagtgcgatgtctgcagtgctattcgccccccgatgaatgagaacgagcagcaactggtacttcgacgacagcaggagcggctttgtatgctacgccatgccagtacttgcacagcccaacagtgcatccttccgtactgtgcaggaatgaaagtactgtggaaacacatttgcgagtgtcaccagcggcagtgccgaacggatcactgtatttcttcacgctacgtactttcgcatttcaagcaatgcaacaagatgatctgtgaagtgtgtgggcctgtgcggaaagctatcaaggtggttgactcttgccggggaaatcctgctcaacttcaactggcggcaagtcagtgcccggatgctgtgcggggcctaatcaagatcatgaatactaccactgctgcggttcctgcaggtgtctctgcatcgggctctgcgaagccaggaaccggggccggagcggctggaggctcacagcaagcgaatgtgaagactgaaggggcaactctagcagcaagcggtgcggctaatcaaccctccaagtcgactgcgagcgcggctaactcggcaaatgtgaaggtggagtcaagtctgctggaagagatgaaaaagaagcctttgaaacttcaaactgagaaagagaaaaagttgcgccggaaagagcaagcaaaaattgcgaaagcccgggcccaagccaaggcggcagcagcggcggctgctgctcttacgggacccgtcagcgccttgggaacatcaggaacatcgcagcccgttatgcacaacggtcttgtggttcgtggaactcaagcggagctgcgcgacgatcatcatgtttcgcaccaagatatttctttcttggactcgatgacggaaggtcaactagatgaacacatccgatcgctgagattcaatttctgcggacatattacggtggcagagctgaagacccggctgatgcctttgcttaccaagctcatggacagtgaatatggctggacattcaacaacccggtggatcctgtgcagtggaatatcccggattacttcgatattattaagtgcccgatggatctcggcactatcaagaagcgtctggaagctgagcactacaacagcgtggaagcttttgcgggagacgtacggttggtcttcgagaactgcattgcttacaatagcagcacgaacaagttcaacattgcagcaaagcagctgcttgcttcgttcaacaagtcgttggcatcgcttaagaatcagctagagaaacagcttttcaaacgctgcgagcagcgtcgcgaagagatgtgccagctgtgcggtggagactcgtttaagtttgccccatgcatgctgttctgtagcgggccgtgtgctggtcgcatccgaagacatacgcactactacagtgatcctcgcggagaacaccattggtgctcaagttgctacaagcagatgaaggatggcccgatcgacatgtcgctcttgccccaattgtcaagtgcggctacagaggtggcacctcctccagctgctggtgcaatcccgtttgatggggtgctgaagaagtcgtcattggtaaagcggaagaacagcgaggtcgccgaagaaccgtgggtggagtgtgactcgtgcaaattgtggtatcatcaaatttgcgcattgttcaacgaacgtaaccacgcgatctctggcgaacaagaaccctttgtgtgccccatttgtgtcaagaagcaacgtgctgctggagtaaaaccgtcgttagacaatggtcttaaggccaagcggcttcctatcacacgaatggcgaagctgatcgaaactcgcgttctcgaggctatcgaaaaggccggcaaggatgaagctgtgcgcatgggcaacatgggcaactcggatagtatcggattttctaacggtgtcaaggaatcgacgtccgacacacagtttggaatcaccattcgggaggtcctcagtatcgataagcaagtccaggtaaagccaaggatgggcaaactactggcagcgaagtatgggaagaccaaaaagtctgaaaacggtggtgccggtggtacgactgggcaatcaaagtcgctgaaacgcccgcggtcgacgatgtctgccgccgacaagaagactgctgctgctgatgcagcttcgtcgtctttatcgctgcagctgacgtatcgctcgcggtgcatttgcgttttccaagagctggatggcgtagatgttcttatctttacgctatacgttcaagaatacggccctgactctttgtcgcctaatgctggccgtgtgtacgtgtcgtacttggactcggtaaattatttccagccgaagaagctacgcacgttgatgcaccagcaggtgatgttgggctttctggaggactgcaagaatcgtggctttcacacttgccatatctggtcttgcccaccgctgaagggtgatgactacattttcttctgcaaaccggagaaccagaaaatcccgaagtcagcgcggctgcgtcagtggtatcaaaagttgctcgtggaagccaaacaggatggtctcgttgtcaatatctccaacttgtacgctgagtactacatgaagaagaaagcagcccacgaactgccctactttgaaggagactactggcctcggctcgcagaggatctcatcaagcagctggaagaaaaagataacggcaatcgagcgaaaactggcgccgctggtgccggagatgctactgttggcaatggggctagcgccagtggtgcaagtacaccagccaatggttctgcaacgccgatttcccggtctccgtctccaagtgaggccagcaatgaaaatagcggtgcgactgatggtgcagctgatgccaagacttctgtatcgaagaaaggagcgatgacacccaatgcgaactcaaaaagcaagagcaagcgtagtaagggttcattcgttactgaaccttcggtgacgcggagcagtgcgtccaaggcgcgttcgaagaagggaggcaagtcgtcgcgatcttctggcagctccaagaacgtgattaataatgatccgctcatgcaaaagctcaagggcattctcgagccccagaaggacgatttcttcgtggtggacttgtacgcgaagtgccacaagtgcggcgtacctatcgtgcaagaaggctactgggagttgaaaacgatccctccgcctgcctctgttaacagcttactcgaagctgccaagaagatccgttcgtcttcctcaagctcccgcaactccccgccgcgccattatcactacttctactgtgggtcttgctacgaagctaacaaaacccagctgctgcatcgtgtggaggtatccggtaactgtgccaagcgcgcacgggatttaagtgagcgaattcttcctctgaccgagaaagcggccgctgctgaactggcagaattggacctacaggagattaagttcgaggcggtcctgaagttcgtggatccttcgctggaggttgaggaggagcctcaggttaagcaagaaaccaagtcggagggcgaggcgggaagtgaaaagccggaagacagtgctaaagaagctgatggttccaagactgcagcagaagctgcttccgccgaagcaaccagtgaacccactaatgctgacggcaaacctgtagacgcggcgggtgcttcagcttcttccgagaaaactgcagaaccctccgcaggaactgagaaacaggctggtgagaagcccgacactagcgacggtaagacgatagagcagaccaagaaggatgcgaatgcggaaacaagtgtggtgcagaagaaggtcaagcgcgtgattggcgacgatctggacgatgtgatcatgccgtgtgaaatcttcgatacgcgagaggccttcctgctgtattgccagaacaaccactgccagtttgaccagattcgtcgggcgaagcactcgtccatgatggtgctgtatcacttgttcaaccagggtacgaccggttttacgtttagctgctcgaactgcaagacgacgttgttgagcgggaaccgctggaattgctcaatttgcccggtgttcaacctttgcgacgggtgtcacgtgaaaacgaagcacgagcaccagcttcatttgttcaaggtggtgccgatcccgagaccgggtaatgaagtgtccaatgagacagtgagtacgaaggtcaagggggtcgtgtccaatgctgctggcgcagcaggccacgtcatcaagcgcgaagcgggcagctccgatctcaagcgcacgaagcatgccaaacacgccaagggagctgggagtaagagtggaggttctcgtaagcgcaagttacaccagagctctccggttgcgactgcaacagctactcctgctgtgaaggccgaggcggcagtccctgtggcggctagtgcagcgccggtggcagaaggtagcgctgcttcggcagccactgcaccaaccgcagcgacagcccccggcgctgcagcagctagcgcccccaacggtaacgcggctgagaatggtgatgcagccaagaagaggcggattcacaacatcgacccgcagcttttgctgcagttggagcacgcaagcagttgcacggtgccgaactgcacattcttcaactgcaaccgcatgcaggctatgctcaagcacggcgcgatttgcgagcagcgtctcgcgggcccatgcgtgctatgcaagcgtattatcggtcttctctcggcccacgcgcgccagtgcaccaaggactacacttcttgcaaggtgccgcgctgtgccgacattcgccgccacttcttggctcaagtccaagctcgacagcagcagctccagcgcgcgcggcagctgcaggctcagcaggcagcagccagtagttctgctgctacggctgtggctgcctccacccccgcagctactactgccacaacagctactcctgcagcccctggggagaagaaggatgcgggctcataggcagtgtccatggtggaatacttgaggttaggcactgttgcaaaagccttgaaagtcgatggcaagtagatagaaatttaggataggtaaggtgtcgagccgtctacctgtagctggcggctcgagccactcgttttgctaatgaatacgtgttatgttcacttgaatcgcttcaacttggtcaggtgagagtcatctcgagccgcagagcagtaggaggatgttgccgctgccacctgaccaaaacgctttacagggacgagaggctcaaccttacaactgtatgggtacacgaggtgaacatgcttgtaaacggtggattcaccgtttgctaggtttgatacatccaggccagaaccgcactcaacttcgcaggggtaaacaattatgcttcacacagtactatccaatgctcaaaaacccattttcccacaacaaactgtccgagtattaataataatgaacgtggtggcggagatccagcgcctgaacgagcgcgagctggagctgaacgtgccgctgtcggcctcgtggcaccagaagtaccgcgagtcggcgtgggtctacgtgggcgggctgcccttcgagctgtccgagggcgacgtgctgtgcgtgttgagccagttcggcgaggtcgaggacatccacctggtgcgcgacggcaagacgggcaagcccaagggcttcgccttcctcaagttcgaggaccagcgcagcaccgtgctggccgtggacaacctcaacggcttccggctgctggaccgcgtgctgcgcgtggaccacgtgctcaagtacaagctgcccaaggagctgcaggaggacagcgactcggaggacgacgagcagacggagcgcaggccgcgcgggctgccgggccacgcgtacgagggcaaggagctggcctcggacttcgacctgcacaagggcgtggacgtgttcgctgcgcccgaggagaccaagaaggacaggaagaagcgcaagcgcgaggagaagaaggccaagaaagcggccaagaagctcaagaagatcgagaagaagcagcagaagatctttcaacaagtgcagaagaggaggcaggagcagaggggcaaggaggagcgggaggccgagagcaagggcgatgaagcagcggcggcggcgcccagtgccacgggctggagagggagactggaaccttcggccccacgaccgagacgcgatacggacaggaaacagggcgacgcaacgagggacagacaggaagacaagagctttggaggcatgagtcgtgtacgctaacttgaggtaggagttctaactgcgaaagcatcgcttagataatgtagacttacgagttttcacttcgtaccagctctactgagccagacttacagaatctccatggttcatctgaaattcgtacacttgcaccacatttttcatgtctgaagcggtggttggtttgtcagccaggtcgtcggcaccgccatcttctgcgtcgtcttgcatgtcttctggcaagtcatagtgcctctgcccgctggaaactgcaaccatgactctgcaagggtcggggaagaacgacaccccgttcgcgcagtccggcagtataatgctttgatccagtagctctcccgtcagcacgtcgtacagcataacgcgacctgttcggctccccgtcgctagataccttcctccacagtgcagatcgaactcgacgcgctggttcgtgtcagccactcggttgaaagtgtgcagaatctcgttcgtcgctcggatatcccagcaatggatgcgagcatcacgccgcgcagccgtgaacaggaacctcccacatggagaaaacttcacttgagagatgccgcgaccgtcgtgatcacgcagagccagcagctcctctccttcgtcctccgtgtacacgcaggtcgtgccgccgtacgatccagccgcgtaaatcttagagtggtccggattaaagtgtagcgtgctaattagccccctctgacccttacgcgagcgccgagtcttggtcagcggcctcgccctgaagtccctactgggctgggacagatcgaagtaccggatcatccggtcgaagccggcaaagagcttggtgcctgtagagttgaacgccagactctgagcactcgccagctcgtccatatggtcgaaagctcggtacgaagcccgcagctcgcccgtgtaggcgtcccacagatgcacgggctggtctcgactagtgctcacgaagatgcacgagttcgggtccgcggatgacatgaaggggtaccattggtagtcgtacactgtgccgccctcccttgcctgtaggatgctggtgctggactgggacgcatcgccgttcatctcgaacagccgcagcgtgtggtcgtcgctgttggtcagcaggcagaggccgtcgggggagaccttgacgcctttggtgaagttgttgctgcaggtggccgagatggcggagaactcattggatgcagtgaactgcagctgcggacggatggccgcattgtggatgaagacttggggctgcgtagcggacgcatcacccgccgacgacgtgaatggctccatcaagttagcgagtgcccacagaacccgctattagcttaattatgtgagttttatccaatcattttattttgcacaaaaagtcttgtaagttcttaccgtagtggttctcacggagcgttgaataatcatcctacatgtgtatattgcgatgtgattggacgagaccgtgctcttgggggatgttgtagcatggaagccgatccgcacagaatggcaatgtcaccacaatttgacgctcccagcactctcctcgcgaggagggtgctggaaaggtgaatgaattgacttgagaaaaacgtaagtcctggacgccgacgcttggagagctcgctcttattggttaaaattgtgaattgtctgctatcgacggatcacaaagcaaagcaatatgctggggagctgccgacttcgtgaagacccgtgagggcgcgcgctccgcgtgaacgtcgctgttgctggtagcgaagctgacagcatcgatgccacaagtgatgtcgctgttgctggcggggtcactatcgcttgtggtgtcgccgcagctcgtcgcgaagatgtcgacgctggagtcgccgatgctgcaggtgtcaaagctggcggcggggcgacatctgaagcttgtgttggcgacaaaggtgttgctgctgccggcgtagatgtcgcgggcggtgtcgatgttgctgatggcgtagccgactggagcgtgactgctgaaggttcgagtggaccatgagctgggctattctccacagcaacttgacgctttcgccgcttgaatggaagcgaccgcatgcctgtgccttcagcttcgcgaatgaatctcagcaccgtggtaaacttgagctgattggttctacgcttacgcttactcggctttaattgaagtttgtgatagccaatgttgaacagctcgatggcgtgaggttcgccgcgaattggaggtagtgacatgcctgtttgtgcttcaccgagtgcgtgccgtaggttttagccgctccatcttttttcaggagatttcctaatgtcttgccgaagcgaagctttgggtcagatcccggaaaaagtggccctggttgcgcgcgcggattacatgccaaataaatcgccaacgctgtcacccaacacgtagatggcgaaaacgggtttgcgtaaagatgacgggggtcacgtggacctgcaccttcctgattggtcttggtcgtaaaaaaatatcgctccaacagcgtcatctttggccaaaaagtgctgcgtctgcagggtttgaacagataccgatcgacacatgagattccactgagtagttaaaaagagatgcgagaaccccctattgttgcgctcaagagtagaccaacaccgctccttgtacatccaaaaagtcagcggctgcttgtccgagtgtttatgagagctagactgattttgctcgacctcgagtcgcttgcacccagaaaaaaactgcttcatgtcatcgacgaattccacagacagcgctactcatttcaatcgatacagatcctttgtcgcgctgcgatagccgctcagagtcgccgatcgggctgtacttcgtttgtacacccaaaattgctcgaaacaagctggagtgaactctgtgaggttagatcatcatcggcatcgaagaatttagctgtattgcgatcctccagcgtcagcgcatacacttctctgatccacttcttgatgccgttgatattgcatgtgtacttctttctcgtctctttggagatgcatgtgtcgtattgcctccacctccgcgatagcgtcctgcgagcttccatcagccatcttcgcatggctcttaaccctattgtggttgatggtcctaaaaccttgcaataggcttggttttacaaatttaatccagtcaaatcacacctctattgattttgacctattatatcacttgcgtaaaaccaagtattttgcaaggttttacaacaataattgcaatatgtttttggtaaactcctgcaaaatgatatattatgctgcggggtgcggcacaaaaccaagcatttatgcatgttttacactttaccatggggacttcagtttacaaaactcaagtataattttgaacactaaagggttaaagtgattttggccaatcatcgtggcgccttatcgtcggctaccgccgcttacgcctttccgtaaggatgcgatcctaactgcccctttagtggacctcagtcaatgtgaggggtgggaatacaccaattccgaaaatcataagccatggcaggaaatcccatatgtaacttacgtaaatacgagaataaagaatgtgtttgattggcctttctaaaggtccgaatgttcaacaaatcaatttattcgtatgtgattggtccgagtggtacccgaacgatgagtgaataatcacgcatctctatgttcaaacggagggaatgaaccccaaaaatcaacatgcgcgctgattggctaacagccattacattctgcaagagctccgtgagaaccactatgtagatcaatattaccgccacttgagaaatacaccctatcctaagccaatcagtgctcagaatgctgaagcatgcgaatcgcatgttgagagatacatgtcattacagaatactaacatacatttttcaaaattatggccaggagcgaatggctcatgaccggcgcagacggcgctagtgtagcgcggcgaagctggtgcggcgcccagcagtattatactagctgtatgttgagtctggtgcgggaaacactttgggtgaatgttgcgtacaagcagtgtagatgtagtgtgtagttgccgtcagtttcggaagtgatggcaatgaaagtctgcttccttcatatccctcggcttatcatattgctgccagcagcgctggcttctttccctttgaatggctcttaatgccctttgtattatccaatcagatgccctaaaacatatcctttgattcttacttcatttcactattgcgtacaatgctgtagtatatatggcgcaacactcccactaaagatgccagcgcgcctctcgaaggatcgctcttgaccattcgacttcaacgccgttctcagattatttcgtgtcgcatacccaaaattaaattatcaggttgcccaagatacttttatcataagcagtacagatacccaatataaatcagatctgcccaaactaagattcatactttatcttatatattggagagagcacctttcccataaagctccctccgccttttgcctttgcttctcactctctcttctgtctctgtgccgcacaagtgctggtcctacgcaaactccgcaaggggggatgccgcaagcgataaactgcaccgcgagacataaaatactttgcaccacaaataattgttttcagacacaaatatggtgggactttgtgccaaaggcaatttttgataagccacaaataaagaaacacttttcgggaagtttttcaacataagaactgtaaagtacaaaatgttgattaaagttaacagtaaaagcaaagttttacagcaaagttaagattaaaggtcagtttaagggctaaaacctcacttttaggtgcaacctaaccctaattgtgggctccttgccggtctgggctgcaagccccgcactcttgagtacattttactcaacattaagttaattttcagtctctgactctctcatctgccgccggcggaaaagtgtagtgatcatagactggatgaccgcgagtagctcaaaacaatgaggctttccattcacagggtccccagttagcctgttggctgcatgttaacctctggggctctgtggcctaggtcacacaactgtagccaggagaatgtgaatgagtaagcttacacctcaaaattctttacgcccatcatcacgcgatgttttcaaattgactttgagtcagtggctttgtgagtgcatctgctatcatatcgttggtattacagtaaataatactgatacttttctcttcatgcttatggcgggcatagatgcctgatatcaatgtgttttgttgacgaatgactgcatgggtcctttattatactaactgcagcagtgttatcgcaccaacactgtgttggccatgcttggccgtaacccaactcattcaatagtagacgtaaccacattgcctctcttacaccttcacttgcggctactaattccgattccgctgtggtgtgactaatacaatcttgcttaacactcttccaagtaatgcatgcaccagcaagtattgatacatatcctgtaattgatctcctttgttcatttgtattcgcgaagctcgcgtctgtgtatagctctaccttaatagtactattttcattgtactctaagccatacttcgacgttcctttcaagtactgtagtactcgctgagccgctctccagtgggtcttataatagcaagataagtacttgctcaactctcttacagcgtttgctatatcaggtctagtgcctcttactaaatacattaatgagccaatcagacctcggtaatcaaacggctgatccgctatctgttcgggtgtcatattagtttctaaaaccacacttttagcttgtggtgtcggctctgtattacagtcccacatctgaaacttttccaaaatgtcctgaatgcacttttgttgcgacagacgcagcgttttcctttttagatctcggtggatctccatttttagcaaataatgcaactcgcctaaatctttcatagtaaacttagcagacaacttagctttcagatcattgagagagagagagagagagagaaggaagtctatttaaccttagttattagcctcctggtaaagtttgagccgctttagcagctccggttcattggtacggcgccagcccgcttggggcggaagcgagctctcttggcccaattccaccttcatggtcgtaagacagtcgatgcaaagctggagttccagtccctgtgttcgtgtgtgcgccctgttgcgttcgcgtcgcgccactgcgtgaagctgtcggaggcaactagcccacatatgctcgagttgctgctgcggcacccacgaagccccttcatgaacaacctggtttctcgtctgccaaatgatggctattccgatgctacaaaacgcccaccaaatccggtccaaagctttttcatagtccgtcgtccgttgcccgtagagctggagaacgcgttcttgaaaccggctaccgatgggtggtcaggttctagaagggaggaagtctttgtatgctgcaagccgtccgtctgtgactacctgcccaagccaatgagtcagtagctttcgccaaaagtcttgggctctagagcaaccccatacgatatgtgtgagcgttgtccgtccttccaggcagcgagttttttcagatcattgatcgagctcaagtgtgaaccagcgatcgtaaggtcgtccacataacggaaaacgccaatttgtataccgcatactattgaattgaacactcgtcaaatttagaaagatatataaataggagggggtatactaccaaagtagctccgacgcatacaagtctggatattttgtagagagctatctacgtcctgcacaacctctttgatgacattctggcaatacatgtaccagtcttcaaaccatggaaatacccataggttgcgtcgagttggttcacaacgcctgtcatgccgttagatgcaagcagaacttagaccaacaactcaaacaattttttctttgggtaccttacggtaattttgcgtaaagttccaaaaatggcaaacagtaccgaaaacaagtgtcactttttcaactgtggtccttaaaaagataaaaattgcttgccgtatttgacaaagtaatactacacgtaaaatagaaggtgattttcaatttcaagacatctcttagccaatcagaagacgctaacatgctaaacttcacataaatttcgcagtttcaagaaaaatataagtattcaacgttctatacggtttggttgaggtatacaatttggcgtaggtacaatagctttgtatactgaccacattctatcagatttgagaggaggtattcaattcgggaagggtacgttatttggcgctatccgttagacgcacacgatcagtgtgtgtgtgactccttcaacctcccaccttttcagatacaagcaatgttctttcttgcatctggaaaaacctaaatcttttagaaaggcatttactacttcgtaccaaattctggggccctgttttaggccgtacatacttttctcaagcttacggacaagctcggatccatcccgaaatcccattggctgtcgcatatagatgctgtcacttagtacaccatttaggaacgctgtagaaacgtccatttgatggaggtgtagatctagaactgtagatagtgcgagcaaaagccgcagggactcataccgggctacaggggcaaagacttcctggtagtcaatgccatacagctgggtgttcccttggactaccaaccgggccttaaatctactgtctgagtggtacttaacgtcgaacacccagtgacagccgtgctcgtcgccctcctggaagaggtattaacttccatgtgccgttctgcctcaaactctgtcgttattgcgcactcccactgtgcggcatattcgctagcccgcgcctccttaatagatcgcggaatgggaatgcgtttcttaccagttgtaacattatttagctgagtggaataatctgttagtctgacgttacacttgcttttccttttagacctccgtctgtcaccactgaccccattttctgatcccactattcgggatgtcggtggtcgcgtggcagatgctgacgttgaggcttcaacttcggtgttcgtttcaacatcagcgtctgttttaggtcgcttacctaaattctgtatgaccttttcctcttccagatccacgctactgtcttcagtagggaacgacatttgtatcattgcctctgtacttgttgagctaaatttaacgtcgcgacagattaggtacttatttgccttgacgtctagcagccgataccccttatatttgggtgtcagccccaaaagcttacactcgattgcccgatcaccgaggtttgggtctgttcgctttgttttttgtacatgtgcatagcatgttgtaccccaaattctgagtgccaagccattgggcttcttacgatgcagtaactcatacggggtcttcatccccagccgggccattggtaggcggttggtggcatctacaatatagtttaaggcttcaggacaccacttagccggcatattggcccctctgagtgtacaacgaacactagccatcatcgtctggtgcgctctttctgcactcccattctcttcttgtgactctacatttgaactttgaaagtctaaaccgagtttagaacacaatttagacacctctgaattcagaaattcagaaccaccgtcggttctaattctcttaaccttaaaaggaaattgtactgacaaattcttcaacaagtcccgaatgttgccgggaacttctttcagggattttaccacaaagtaccacttataagcggtagcgtcatctacaacgaacagggcatagtgatagccaaatgagccatataaaccattcacccgtaatttaccagttgagtccatatggagtgtgtggagtggctctgtggccttggctcccaccatgttcttataggacattcttttatctttcatttgggcgcatgtcttacaaaagaaatgaaccttcttcagttcagagtaaggtagttttggcagccctgcaattttctcgttacttatcgttcggattaaccaatctttaccaacgtggccgagcctcaagtgccattctttcaaaatattaccaaacttacggctttggacactaaaaaatgctcgtccggactggctttacattcggtaagtaataaacttcgcctatgaccactgctgcaaacagtagcttgaagtcttttcctaagaaaaagaggaaatcgccagatttgactgaaagttcctgtacccttgctttgccaaatagtatgcacttagtaaattactgtcgcaattccggtcatatgagatatccgttaaacttaacgcactcaaatatccttcaggatttaaaacattcagttttattgatcccttaagtgcactatgtgaaacggtaccattaccgtaagtgaagacgtggctctggctaggctgcaggcttccttcaaaccagcttcggtctgaagttatagctctgcctgctcctgtatccacgacccacatatcgtccgttaactttaggttctttaggtaccgtaaataatccgtatgaaatttacgtgccatctcaacttcgtccatattttgcggcaacggcgactccgccgacttgccgttgtcctgattggccggatccagacttctgaggtcgtccacaatttggtcctccgtggccctctcgagtgctgtcttgccgtcctcatggaggcgcttcttgctgtcggtcacgaccgccttcatcgtgttaattgcggttttcttggcctttttcgcaccgggagccgttttgatgtcggtccggaacaatggtctaccttcgcggttcgggttccggtcaaacgccataacaggacagtcggccttgaagtgtccacctttgaaacagtagaaacacgtccgtccctcttttccgtccgcatgcttgcgcttttcaccgtgtttggtcctcatattgttgatggggatggacgcacttctgtccatgttctgacaaatatccttctttgacttttcctggaaaatgcgcctcagtgcgctttccaccttctcgacagtgaagtcgccctttttcatggagatggactatgcccaaaactcattcggcaactgggacaggacctccactcatagccacgattcagtgaccatgtcctctcccagaagctcttgcgtctttctgttgatttcattgcttgctttcttcagctgggcgaagagggtgtgaagatcgcgccactggctccgagccaaccttgaccaggctcgggtcaactcaagcagaccagctgcatcgccctgcccatagtccttctcgagggccttcattacctcgcatgagtctaggttcgacactaggtctgacagagttgacaggaaggagttgggtaggacctgatttagcaggttttgcaggtctccgcgacccctttcccagtccatcacgttccaagccatgatgttcttctccttatcggtgaggtcactatccccagggactgatggcggcttctccgggcttccatggaggcagtcgaccatcaaaacgtggacagggggcagcgtcttctcgagttgcttgcgcttgtacaactgatcgaggtgattgacgtgcgtcaacagcttatccttccacatagcgaaacctttgccgttgaaggcctccaggccgccagcgctcttcttctcggtcgtcatcgacgtaggtacttgaaatgttgcgtacaagcagtgtagatgtagtgtgtagttgccgtcagtttcggaagtgatggcaatgaaagcctgcttccttcacatccctcggcttatcatattgctgccagcagcgctgacttctttccctttgaatggcacttattgccctttgtcttatccaatcagatgccctaaaacatatcctttgattcttacttcatttcactattgcatacaatgcagtagtatatatggcgcaacagtgaatcctatcaaagtgagcgcacccgccttctgtgctgggtacgggtgcgttcctgaaagcttctgttctatctgatgccctgagcgccgcctagcactctaccggctagagctcatgcgatattcgcaaacggaaagaggcgtttaatgctgccaacaaagggccagcagcgtgcgacctgccaaggcttagtgtactcttccgacatagcgttcgctaccatggcacccgcactcgcactgcgacgcttgcagtgacgttcgtcagtatttaggaatggcttcatttgtcggaaaatgattaaaaaatagagtttgggctgaggcatcaactccgcaagggtacctaccccttgaagacaggttaattactatgtgtcctgttttaaatttattttaaaggataattggttactagcattaactttggtaaaagtgcccagaaagcttttcgatgagatacaccctaacgccttttggggaataatctaaagggcgctttatgtagccttttgccgcgaaatggtcaatacgaagtcggcctactgcttgtagaccagggtgagggtttaaattgaggtttttaacttgttacttttccggttgttcacctaggtcatccaaggccaagacaaataaaggtttccgcaatatactaggcttacgtgcaaaaggcgacaagtaaagcaaaaaaagcattaaactagtccaatccttcacatagctatccgttagggacaaccgtaaggcttgttagcacaatagactagcaaaaagcgttcatgtcgatattcaagtctttatggctagcaaaatgcgttaataccgctaagtttctacggatgtgaagtcgcaggtaccgcgaagagcagtaactctagcccaaggtttgtagcagtagtcgagctgaaaatcgcagtagcaactcgagtcggtcgatcggagatcttataaccatggtccggcgaaaatggaccgacttgtgctacaatatgtgaagcttgaagattgagctgtagctgcacgcagaggccgcgagagaagattgaccgcgatgcccaagtgtatagattgttcgatgcaaactgcaaagtgctattagcgggttgaggcctttttgctgtccgtcgggggagtacccaaggcagtgctaaagtaaataaatttgatgggtcaattcacttcaagttgaagcgaagtgggttgacgtgcaccatacaaaagtcaatgtgccgtacaaaggcagtgcaccatggtcatgtttcctcgcttgtctacttgctgggtgaacgtggctaagcacataagatgtttacaccccacaagttgtagttgagcggtttcagtctcgacgtgctcgtcgcatgtctcggtcctgacatttccgccgcccactggaactggaattatcggcacgtttgtgagtcggatagcaaaagaccggaaataatctatttaagtcgatcgttaaaccgcatcagaatgttttgaccaaacgtgcaaaaaccgcccaaattgttgcaggttgacgtcaagtgctgaaagtgctgacgtacccttagaaaattcgatccgtgcgaagcttcgcgtgcatctatgattgcagcgtatcttccaagattttcgacatcgtcgacctagacaagtcgtgggacgaggaataaccgtttgcatagagcatgtcacagacctggaactggtcactttgcataaccagccgtttactaagtatggacctgcgtgcaacactctttgagccccgctcaactctggtagcacttgcggggagaaaatctctctgctgcaaggcatgtatttgaactcggggtgtaagtgtctcgtcagcgtgaccaacccagctgttggagagacatttttacattggtagagcagcatattaattgtgcgctgaccgtgagaaagaaatagagatcagacgtggtggaagttcagtttgcgtctgaccccggtgacatcccaattacccagtcttgaagctggttagctttttttcggcttagcacaaacttcgacttgtgacgtctcgcctgaagagctaggtgttggcgggagcgtacgccaacgttcgtaaggacaaggtaacaaagttcgttggtccgttctgcagcttgttgggagggggggcaacccaggcaatacgggcaaggcttggtgagacctctacaacaacctctacagctttatagcgaaatcaaatcggattcttgaggcgttgttaaaaagggcaacattaacgagtctgagcacccggtggagaaaaatttcatcatcaagattgctgaggcttcgcctaaagatcctcacagggctttgtcgcgtccatctaatagcgtttctgtaatgggcctaccttggctcactactacggcttacacgtatgcgcacgtgtatgaggaagcgtaggtttctacttgagttaagtatactcgagatccacgagtatactttaaacaagataaagactacaagtagcgggttttggtaaaagatgagaactgctatttttgttttgtttctgatttcctctaaatgtaatattctaaactagaaatatgtcaacggctggttggctggattctgctaacatgcaagccactcattggctaaaagatgctgctttcagtcaataggaatcctaaatgtgtatggaccacccgtcgtggtggtcataaatgtatgtagccattggtgtacgttacaccaaggtcgaggaagtgttcaaacctctaacagacgtcgtgtctgttagagttacaagtgactgtggccacttgcgtataaccccgttacaccatccccccgtcaaggttagacgtgccggtcccggcacgtcaactaccattgaccgcttggtcaatgcgtgacgttgaagagagcgcgctcgtaatggaacgagcgtgtcgaagttgaagaccgctggcgcagcagcggagaacctctctgctgctgagtagcatgcgcggcaacgtgcgaagcacgtcgctgccgcggggggcaggtacctatgtctgccctcgaagtgtcttcgggcgctgctgttaacagcagcgctcgcattacgttccagtgtgcagcgcatggtgggcttcgtacgccctcaccatgtccgggacgtcttcgagcaagacgttccgcggctcccatgtatcttggttgggagggaatcctctccaacggatacgaaaacgaactggttgcctgttcgttctcgggatactgtgatcaacaatccgctcaacaatccatcgagttgagccgtgtgcatcacgaatcggcggcggcggtggcagaaacacaccccgtgtgtggtcaacttggtgttgaccctgatctcgtgtctccccacaaccaagtcccagtcgtggagtagttccagagcgctgcgttcggcgctctgaagtattcgcagtttgcggcggcctcccagaccgcctcgatcgttccgaccgagctggaccattagctggacccgctgctccagcgcgaagtcgcgctggaggggacgatggcttccgtcgagtcttctgcttcggttcagccgagctaggtagctcgtgctgcaggtatggcttcagccttccgacgtagaacgttggatggagacgcatgctagacggaatgtccagtgtgtaggcgttgccgtgccgtgccagcacagtgaacggcccgatgaagcgcggagtgatcttgctcgccctgaaatcggaaacggcatgtttaggcaggttttgagtagctaacaaaaccaatgaacccttcttgaaatcatttgtgttgcccctgccaacgttgtctgcgttcagcttctgtcgatcaacagaagctgcaatagcgtcttggacaaaccaaatgacggcttgtctgcgctgcacgaagttgaatgcgtccgagttgaactcgttcagctcgtttctagcagtaggcccgacctctgcgttcgtcttcgcggtgtctgtgccctgcacagacccgttcttcttcttcttgctcttgccggcgtctgtgccctgcacagacgcggtcttcttcttagatacactcggaacttcgcgagtgcgtacttcattgcaaggagctccttgtcatgtaccgggtagttgcgctcagctggcttcagctgacgcgattggtagtagacgacacgatcacggccctcgtgctcgtgctgcatcaacgcacatccgattgcgaagtcggatgcgtcacacacaacgtggaatgggcgatcttggtcggccaccgccaagatcggcgcctcagtcaagccccgcttgactgcatcgaaggcctgctgacactcagcagtccaaacccactcgacgtccttcttcaggagctgtgacagcaagcgtatcatgcccgcgtagtccttcacgtacttgcacaagtacgtggccaagccaaggaactgccgcagttccttgacgttcgacggcgtcggtcactcattgatcactctgaccttctcagggtcagggcggacaccattcttcccaacgcgacacccgagcacgggtatctcgctcgccccgaagatgtacttcttcagattcgcatagagcttgtccttgcgcatgagcgcaagcagcttccggagatgcaccttgtgcatctcaacatcgctcatcccgtccgcagcccggctgtggacgaacacatcgtcgaagtagctcggtgcgaagtcgcgcaccgagcacaacaagtgcgtcacgcacctgttgaaggtcgcaggggcgttattcagaccctgcggcatcactagccactcccagagcatgccgctcggcgtgctcactgccgtgagagggatgtcgctctcacgcatgaggatctgatagaacccatcgcgcacatcaagagcactgtagatagtgctcctggtcatcgaatcgatgataacatcttttcgaggtatcggcgtctgcgccggtatcgtcgcatcggtcagcttgttatacgcatgaacgatgcgccagccgccctgtggcttcttgacaccgaacgtctgggcactgtgcggggacttcgattcccgcacctgtccagctttgcgacgcctttcgaagaagtcgtcgatcgcattgacctgctctcgcggcagtggccactgccgcgtgacacagtacttcgtgcccggcacgagatcaatctcgtgctggattcccttgtcctgcggaagctccgcaggaatctcttccggaagtacgtccgcgtactcccgtaagatctcgtagtagggactcgttttcaacgagtcccagctttgctcttcaaagcgctccttcttagtcttcgcactgagagtgtcctcgctctcagtggtggtctccatgaagaactgcctcagttcttcattctcgctcttcgttctctcggcgtccgagagaatgcatagttgctcgatgcgttcatcgtgcaagtcacgcgcgaagcgcttccagctcatgactggaagcgaagtcaactccgacgcttgcgtcggagggttagcgagagtcatctccctgtaccggaacccggcacaggtacgcgtcaagacattcaacgtctcgacgtccggcttttcagcctccgtctgcccggcagacattccttgtagcgtctcggccccaggccgagacttgcgcagcgaccttcgcatgcgccgtcttcttgttttgcggagcccggctccgcttggttcttgacctcgtccaggcccagccgtggacgggtgttcttctttagtaccgccggcgggttcatcccgcgggcgagcgacttcaagcccggcttggtcgcccggcgcttcgtcgtgcagcccggctgcacgacagcatgcaagtttttccggtgcggaacgtttgcaaccgtccgcaccgccagcagcgtcggcccccggagccgacacgtcgtcttcacctcgacgcctgttattggcggagcccttcgttacaaagggtgcgtcgactcccggagtcgacgcgaaacttcttttcgcagcgccggttcccggaaccgtcgcgactttagtgcctcgacgccaagcattggcggagacccccattacggaggatacgtcggctccccgagccgacgaatcaaattcacccaagccatcgactcccggagtcgacggcgttacgtcaccttggctcttattattggccagacctgatccaatcagattcgcgtcagcctccacggctgaggcgtgtgactcgcctgcgtcatccgtgccccttgaggccggagactcttcctgattcgctgaaaagcgggtgtcgacctccgaggtcaacacatttccttcattagctgtcggcggcaacgccgacgctagctgctcttgcgcgcgtgctcgcgcgcgcccagggcactccaggacagcggcattaggcgccgtctcgagtggtgagtcgcgcgtacctgtcggtgcgtgcgtagcggcaacagggccatcgctcactgttccgctgtcgcgaccgaagcgcacgagagtgcgcttctcccaatcgatgaccggatcatgccgtgcaagccacggcacgccaaatacaatgtcaaacttatcgtccagatccaggactataaaggtctcgacaaactcttgatcttcatgcgtgaaacgcacgcgtaccatgcgcttcttcggttttaacgatgaaacccgttgccaatcgaacttccaacatacttcgaggtataattacctcctcgaagtcaagccttgatagacttcgcagtcgaacaaagttgtccgacgcgcccgaatcaaccaaagcacgaagagagttgctctctctcttcgaagacacgttcaagatgacaaggttcggtttgtcatcatgcattttgcagtgagaagggtcctcactgggggctgcagtcctcagtgtcgcatgtccgagttggacatgcgtgactgcttcaccagtagggcgccccgcgcctattgggttccagcgttttttgttcgttcgcgacgatgcccggcatcgccgcgtcgaccaccatctcggtgcacgggtgccgtgcactctcgggcgtagtgaccgatccttccgcaacggaagcatcgtacattactttcttgttcctgttgataaccaacggccgttgcattcgagaggtccattggttccggacctcccgctatcgcgaccggaggcggttgcagcctcggcgcattcgcatgcagtttagcctgcctcagactaaactcctcctgcattgcaagagtaatcgcagcttcgagagtgcctgggtactcacggaagagataggtctttacaggcccatctctcggacccttcatgaacgtgacgaccttggtcgcctcgtcgatcggattggtcacgatgttcgagaccaagtaccgtgctctctgcgtgtacgtatggacatcgtgcttaccctgctgtaggtcgaggaactctgccctcgacccaaacgcattttgcgggggctcaaatgcttgtctgagctcctccttgaaattcttgtacgtgctgaagcacgtaggatcagagagtcggcgtccatacgcccaacttctcgctcgtccgccaaggcatgacatggcgaacgcaaccttggacaacgggtcgacgatacgtcgagccgcaatagcagtgtcgagttcgacaagccaccggaggagaggctcgtgtggagaagtgctgaataagaattgatctccgagaagggcggtagggccgatcgactggaagtatgggggatcagcgatcgagcgacaggcagcgaggatctatggatcagagggagttcttcgggagctctcaattggcccgatgacgccggcgcgtgaggcaggacatgtggcaagctagattgtggatgatcgcgttcgaaccgtggcgtgattcgaggccgacacaagtccggatcggcgacacatctcgcagatctaggacggccgaggacggaagatgatggatcggcggcgtagggcaaccggcacaagtcggcgatcgagaggtgatcgccgatcgggatcgatcgcagatcgggagtcgatcgtggatcgggagccgattgtgggatgatcttggatcggggatcgactgcgatgggatgcacatggaagacgaagtcaggacaagaatccagtggttgtttagttgtaggatggtagatgagatggtagtggtagagagacaccagctaaacacaaatcagagtcgaatttgcaccgtggagcgcaagtggtctggaatctcgaggaggaagagcatattggtctcgatcgacttgcgttgtggacaacatatttgaccccacgcgtgatccaagaccaccaagccccggcaggtcgctctcgagcagaatttgcaccgatgagcacaagtcccctcaagtcgtcaagtcccaggaactacattggcctcggcaagcatcgacactttggacagtgagctagtggtacggttaaggctggatcaatacattggccagcttgacctactctagcgatctatttcttgtgtgcgaaccctcgatcgaccggatactgcttggccggcgatcgtttctcctctcggtcaacctcgatccccctataggaagccgcaagcaactcaggaaaggaaggcacacacccggaaaggcaactacaggccttggatctactccaggccgaccgatcgaagcgaagaaccgtcgatcggagcgtacactcggacgcagagcgaagactaccgcgctgctccacaaactatccctgcgtcactcgatcttcaccacgtgctgcatcttcggagccccgagagagcggatccagcctgccgacgggtacacaaggtgagaacaagttcagctgatcacggatcgttgggggaccccctccgttagtcggtgtctgggcgctggtgggaagcgcgatcaggccttaaccagattttggcctatttagctgcaccacactcgccctctcttccgacatagttgctcacgtttagcttcaacgattgctcgcacggtggcgtcggggatgccaccgtgatagaggaagcagcatcaggctgctccttcatgatgaatcccagagcaacaccgtgttgctccgtcggcgatagtgtgcacagcattgcagctacagccgcttctccaatgactgttgacagtcgttggagtgcctcccactctggatccgacaggtggaggcagccagcgcgtgcaacatgagttacaggcgaagtggagctttccatgggcacttccgcgctcatgaaaaggttctcggctcctcgttggtacagctccgtacgaacgttcgggctgtccgtcgttggacggactagaaagtactaccaggtgtagtgggcctaccttggctcactactacggcttacacgtatgcgcacgtgtatgaggaagcgtaggtttctacttgagttaagtacactcgagatccacgagtatactttaaacaagataaagactacaagtagcgggttttggtaaaagatgagaactgctatttttgttttatgtttctgacttcctctaaatgtaatattctaaactagaaatatgtcaacggctggttggctggattctgctaacatgcaagccactcattggctaaaagatgctgctttcagtcaataggaatcctaaatgtgtatggaccacccgtcgtggtggtcgtaaatgtatgtagcctttggtgtgtctacaccaaggacgagaaagtctttcgaacctctaacacacgtcgtgtctgttagagttacaagtgactgtagccacttgtgcgtgtaaccccgttacagtttctgtgaaattgagatttcatgaatgggccgccaggacaacaagcgtcgccgcttgatcctaacttcgcgcacaattggaccaattttaggaagtagcgtagactatttcgttaacaggatttccggtttgcacggttttcaacagtatacgtagaattagattgctgtaaacgatatcaggttccaagactgaacacacgatattcgaaggtttggcggattcgaaaaagaggatacggtcgaatcgaagcacaacctgttggcggtcattgcgatgcgaacggaattaatcggcgagctgctcacccgaggcagctatccaaacccatctagatggcatgaagatggtcagtatggggggacactcaagccgtcgtttcaactgtactgtaccgggagcaagtggaagagtttattttaactaggggcatagaaagggacgaatagtaagttgtgtgaccgtgttgacagtgttgaccggatcgccgaaggactgtgccgccagtggtgtatcgttaagaagggttacatgaggagcgttggggtcatccttgcgaagatgactgaaggtgttgtgcctctggatctgcaagagcgtctttgaggctagatgagcgacttgaaggggcgttgagacaaggacttgtttaagtacaccagcgtttttaaaaaagttggccattaagactaaggagatgagcgacctgaacaaaatcatgtatttcctacgtggttagatgtcaaacattagggaattagtccagtatcacagatggcatcgttgaccaacactatcactgtaatgctcgagtatgaacggcctcacgggcatcgctctcttggagcacctaaagaagttcgacagcatttttaagcggctgcagcgcgacgacccggacatgaccgagatgcgtatcatgtttgacgtgctgggcgtggagtatcgagttatggcggaacatctgagatctacggcttagattgtccacactccggcgttcgaggctggaatcgtcaaggtgatttctaaatccgcgtttcatcggcggaagaagcagccttgaagagttttgaagcgagtcaagttacggggaagaagcacaaggagagggaagaaaactacgcgaaacagctacttcgaggcagaggaaagaagcgaacaacaagtacaagctcgatgcagtacaacccactcgtcaaaatggtgtcgccgacgtccaacacagtggaacgactgttttcgcagtgcaagctggtattggcaccacagctgcgcgggacgtatcccgcaaactttgaagagctcgaatttctgcgggtaaaccgcggcatgtagaacttaagtgcggttgcgggcgttgtcgctgaatagaagtagtaacattgtctagtgacaagctcaatacatacacctaatttttttcttctacttgaatcaaattcttgaaattatttcttgttcgttgcgaaaaagtaaatcatagttgtttggacccatgcgtcagcttcacaatgcacgtttgcttactttttcatgacctgtagtcatatacaacgcgtgagtgcgggaggttaccccccattaagcgcgtagctccagtaatgaaggagaagaagcactttgcctatcaccccctgccatttgcaacctaaatcctttccaagcagatataacaacctaatcactttcggttaattatcgcacctaattaattcagactctataaaataaaaataaagctcacacattccaaccactagcaaatgtagcaagtaaatatagcatacaaaacccacctataatatttttattggtttaggcggctcctggtgttcatgttgctaaaattactgcaagcgatgcggtttattgcgctgtcatttccaaatttcacggaaatgccacgcaagaacaatcgcaacaagcacctcgcggcagcaagtgacagaagaacgctcaagtggccagatctcacattttaaccgaactgaccgatgaagctcgcctgacgcctaggtgccgtccgactatggacatcgcagagatcaacaccaactccgaggatgagagccctgattttgatgaaggtccggatatgtttgttgtggacacagtatacgctaagaagagcaacactgagggaagagacttttatcgagatagctgggtgagcttcgcccgactgatctggcagccagcccatattctaccgcaaaaccttattaccactttcaaccaggaagagattggcttcatttggccaaccgattgccgagcgatattcctcttgtatgtacatacaaactccaaggttaaagtttttgagctgataaaatatctgataatttcaagtttataggcgtgtactataaaaaagtctggactttaatagagcgagtacgttattagccaacgtcttgccctgtattccctttacttattatccaactagaagtcacgatggtaagccctgacacctgcacttcgcctaatgcgtttttttttcgccgcatttttcaagtggtgccagatgcaccttcgtagccatagctgggaccgcctagatgaggcggttgcacgctatttttaaggatggggggggcacattcgacgaggtaacactacgaccgtcggtgaggcaatcatgcatctcctcaatgaggtacttaacaccgcccatctcattgacacagctgcccaagtcaacgatggaggtgaggcagagtgggtgtaacagattatagcagtagatcagaattagagctagaacagattagaacggataataatattaggggctccagccacgtgtatggctgcaggagcttaggcttggggagaagccagcacgtttggattctccccgccagcccttagcgtgtcttcctgctcctacaggttgtctttgtaacggggttacgcgcacaagtggctacagtcacttgttactctaacagatgcgatgtctgttagaggtttgaacacttcctcgaccttggtgtaacgtacaccaatggctacatacatttacgaccaccacgacgggtggtccatacacatttaggattcctattgactgaaagcagcatcttttagccaatgagtggcttgcatgttagcagaatccagccaaccagccgttgacagatttctagtttagaatattacatttagaggaagtcagaaacataaaacaaaaatagcagttctcatcttttaccaaaacccgctacttgtagtctttatcttgtttaaagtatactcgtggatctcgagtgtacttaactcaagtagaaacctacgcttcctcatacacgtgcgcatacgtgtaagccgtagtagtgagccaaggtaggcccactacacctggtagtactttctagtccgtccaacgacggacagcccgaacgttcgtacggagctgtaccaacgaggagccgagaaccttttcatgagcgcggaagtgcccatggaaagctccacttcgcctgtaactcatgttgcacgcgctggctgcctccacctgtcggatccagagtgggaggcactccaacgactgtcaacagtcattggagaagcggctgtagctgcaatgctgtgcacactatcgccgacggagcaacacggtgttgctctgggattcatcatgaaggagcagcctgatgctgcttcctctatcacggtggcatccccgacgccaccgtgcgagcaatcgttgaagctaaacgtgagcaactatgtcggaagagagggcgagtgtggtgcagctaaataggccaaaatctggttaaggcctgatcgcgcttcccaccagcgcccagacaccgactaacggagggggtcccccaacgatccgtgatcagctgaacttgttctcaccttgtgtacccgtcggcaggctggatccgctctctcggggctccgaagatgcagcacgtggtgaagatcgagtgacgcagggatagtttgtggagcagcgcggtagtcttcgctctgcgtccgagtgtacgctccgatcgacggttcttcgcttcgatcggtcggcctggagtagatccaaggcctgtagttgcctttccgggtgtgtgccttcctttcctgagttgcttgcggcttcctatagggggatcgaggttgaccgagaggagaaacgatcgccggccaagcagtatccggtcgatcgagggttcgcacacaagaaatagatcgctagagtaggtcaagctggccaatgtattgatccagccttaaccgtaccactagctcactgtccaaagtgtcgatgcttgccgaggccaatgtagttcctgggacttgacgacttgaggggacttgtgctcatcggtgcaaattctgctcgagagcgacctgccggggcttggtggtcttggatcacgcgtggggtcaaatatgttgtccacaacgcaagtcgatcgagaccaatatgctcttcctcctcgagattccagaccacttgcgctccacggtgcaaattcgactctgatttgtgtttagctggtgtctctctaccactaccatctcatctaccatcctacaactaaacaaccactggattcttgtcctgacttcgtcttccatgtgcatcccatcgcagtcgatccccgatccaagatcatcccacaatcggctcccgatccacgatcgactcccgatctgcgatcgatcccgatcggcgatcacctctcgatcgccgacttgtgccggttgccctacgccgccgatccatcatcttccgtcctcggccgtcctagatctgcgagatgtgtcgccgatccggacttgtgtcggcctcgaatcacgccacggttcgaacgcgatcatccacaatctagcttgccacatgtcctgcctcacgcgccggcgtcatcgggccaattgagagctcccgaagaactccctctgatccatagatcctcgctgcctgtcgctcgatcgctgatcccccatacttccagtcgatcggccctaccgcccttctcggagatcaattcttattcagcacttctccacacgagcctctcctccggtggcttgtcgaactcgacactgctattgcggctcgacgtatcgtcgacccgttgtccaaggttgcgttcgccatgtcatgccttggcggacgagcgagaagttgggcgtatggacgccgactctctgatcctacgtgcttcagcacgtacaagaatttcaaggaggagctcagacaagcatttgagcccccgcaaaatgcgtttgggtcgagggcagagttcctcgacctacagcagggtaagcacgatgtccatacgtacacgcagagagcacggtacttggtctcgaacatcgtgaccaatccgatcgacgaggcgaccaaggtcgtcacgttcatgaagggtccgagagatgggcctgtaaagacctatctcttccgtgagtacccaggcactctcgaagctgcgattactcttgcaatgcaggaggagtttagtctgaggcaggctaaactgcatgcgaatgcgccgaggctgcaaccgcctccggtcgcgatagcgggaggtccggaaccaatggacctctcgaatgcaacggccgttggttatcaacaggaacaagaaagtaatgtacgatgcttccgttgcggaaggatcggtcactacgaccgagagtgcacggcacccgtgcaccgagatggtggtcgacgcggcgatgccgggcatcgtcgcgaacgaacaaaaaacgctggaacccaataggcgcggggcgccctactggtgaagcagtcacgcatgtccaactcggacatgcgacactgaggactgcagcccccagtgaggacccttctcactgcaaaatgcatgatgacaaaccgaaccttgtcatcttgaacgtgtcttcgaagagagagagcaactctcttcgtgctttggttgattcgggcgcgtcggacaactttgttcgactgcgaagtctatcaaggcttgacttcgaggaggtaattatacctcgaagtatgttggaagttcgattggcaacgggtttcatcgttaaaaccgaagaagcgcatggtacgcgtgcgtttcacgcatgaagatcaagagtttgtcgagacctttatagtcctggatctggacgataagtttgacattgtatttggcgtgccgtggcttgcacggcatgatccggtcatcgattgggagaagcgcactctcgtgcgcttcggtcgcgacagcggaacagtgagcgatggccctgttgccgctacgcacgcaccgacaggtacgcgcgactcaccactcgagacggcgcctaatgccgctgtcctggagtgccctgggcgcgcgcgagcacgcgcgcaagagcagctagcgtcggcgttgccgccgacagctaatgaaggaaatgtgttgacctcggaggtcgacacccgcttttcagcgaatcaggaagagtctccggcctcaaggggcacggatgacgcaggcgagtcacacgcctcagccgtggaggctgacgcgaatctgattggatcaggtctggccaataataagagccaaggtgacgtaacgccgtcgactccgggagtcgatggcttgggtgaatttgattcgtcggctcggggagccgacgtatcctccgtaatgggggtctccgccaatgcttggcgtcgaggcactaaagtcgcgacggttccgggaaccggcgctgcgaaaagaagtttcgcgtcgactccgggagtcgacgcaccctttgtaacgaagggctccgccaataacaggcgtcgaggtgaagacgacgtgtcggctccgggggccgacgctgctggcggtgcggacggttgcaaacgttccgcaccggaaaaacttgcatgctgtcgtgcagccgggctgcacgacgaagcgccgggcgaccaagccgggcttgaagtcgctcgcccgcgggatgaacccgccggcggtactaaagaagaacacccgtccacggctgggcctggacgaggtcaagaaccaagcggagccgggctccgcaaaacaagaagacggcgcatgcgaaggtcgctgcgcaagtctcggcctggggccgagacgctacaaggaatgtctgctgggcagacggaggctgaaaagccggacgtcgagacgttgaacgtcttgacgcgtacctgtgccgggttccggtacagggagatgactctcgctaaccctccgacgcaagcgtcggagttgacttcgcttccagtcatgagctggaagcgcttcgcgcgtgacttgcacgatgaacgcatcgagcaactatgcattctctcggacgccgagagaacgaagagcgagaatgaagaactgaggcagttcttcatggagaccaccactgagagcgaggacactctcagtgcgaagactaagaaggagcgctttgaagagcaaagctgggactcgttgaaaacgagtccctactacgagatcttacgggagtacgcggacgtacttccggaagagattcctgcggagcttccgcaggacaagggaatccagcacgagattgatctcgtgccgggcacgaagtactgtgtcacgcggcagtggccactgccgcgagagcaggtcaatgcgatcgacgacttcttcgaaaggcgtcgcaaagctggacaggtgcgggaatcgaagtccccgcacagtgcccagacgttcggtgtcaagaagccacagggcggctggcgcatcgttcatgcgtataacaagctgaccgatgcgacgataccggcgcagacgccgatacctcgaaaagatgttatcatcgattcgatgaccaggagcactatctacagtgctcttgatgtgcgcgatgggttctatcagatcctcatgcgtgagagcgacatccctctcacggcagtgagcacgccgagcggcatgctctgggagtggctagtgatgccgcagggtctgaataacgcccctgcgaccttcaacaggtgcgtgacgcacttgttgtgctcggtgcgcgacttcgcaccgagctacttcgacgatgtgttcgtccacagccgggctgcggacgggatgagcgatgttgagatgcacaaggtgcatctccggaagctgcttgcgctcatgcgcaaggacaagctctatgcgaatctgaagaagtacatcttcggggcgagcgagatacccgtgctcgggtgtcgcgttgggaagaatggtgtccgccctgaccctgagaaggtcagagtgatcaatgagtgaccgacgccgtcgaacgtcaaggaactgcggcagttccttggcttggccacgtacttgtgcaagtacgtgaaggactacgcgggcatgatacgcttgctgtcacagctcctgaagaaggacgtcgagtgggtttggactgctgagtgtcagcaggccttcgatgcagtcaagcggggcttgactgaggcgccgatcttggcggtggccgaccaagatcgcccattccacgttgtgtgtgacgcatccgacttcgcaatcggatgtgcgttgatgcagcacgagcacgagggccgtgatcgtgtcgtctactaccaatcgcgtcagctgaagccagctgagcgcaactacccggtacatgacaaggagctccttgcaatgaagtacgcactcgcgaagttccgagtgtatctaagaagaagaccgcgtctgtgcagggcacagacgccggcaagagcaagaagaagaagaacgggtctgtgcagggcacagacaccgcgaagacgaacgcagaggtcgggcctactgctagaaacgagctgaacgagttcaactcggacgcattcaacttcgtgcagcgcagacaagccgtcatttggtttgtccaagacgctattgcagcttctgttgatcgacagaagctgaacgcagacaacgttggcaggggcaacacaaatgatttcaagaagggttcattggttttgttagctactcaaaacctgcctaaacatgccgtttccgatttcagggcgagcaagatcactccgcgcttcatcgggccgttcactgtgctggcacggcacggcaacgcctacacactggacattccgtctagcatgcgtctccatccaacgttctacgtcggaaggctgaagccatacctgcagcacgagctacctagctcggctgaaccgaagcagaagactcgacggaagccatcgtcccctccagcgcgacttcgcgctggagcagcgggtccagctaatggtccagctcggtcggaacgatcgaggcggtctgggaggccgccgcaaactgcgaatacttcagagcgccgaacgcagcgctctggaactactccacgactgggacttggttgtggggagacacgagatcagggtcaacaccaagttgaccacacacggggtgtgtttctgccaccgccgccaccgattcgtgatgcacacggctcaactcgatggattgttgagcggattgttgatcacagtatcccgagaacgaacaggcaaccagttcgttttcgtatccgttggagaggattccctcccaaccaagatacatgggagccgcggaacgtcttgctcgaagacgtcccggacatggtgagggcgtacgaagcccaccatgcgctgcacactggaacgtaatgcgagcgctgctgttaacagcagcgcccgaagacacttcgagggcagacataggtacctgccccccgcggcagcgacgtgcttcgcacgttgccgcgcatgctactcagcagcagagaggttctccgctgctgtgccagcggtcttcaacttcgacacgctcgttccattacgagcgcgctctcttcaacgtcacgcattgaccaagcggtcaatggtagttgacgtgccgggaccggcacgtctaaccttgacggggggatggtgtaacggggttatacgcacaagtggccacagtcacttgtaactctaacagatgcgatgtctgttagaggtttgaacacttcctcgaccttggtgtaacgtacaccaatggctacatacatttatgaccaccacgacgggtggtccatacacatttaggattcctattgactgaaagcagcatcttttagccaatgagtggcttgcatgttagcagaatccagccaaccagccgttgacagatttctagtttagaatattacatttagaggaagtcagaaacaaaacaaaaatagcagttctcatcttttaccaaaacccgctacttgtagtctttatcttgtttaaagtatactcgtggatctcgagtatacttaactcaagtagaaacctacgcttcctcatacacgtgcgcatacgtgtaagccgtagtagtgagccaaggtaggcccattacagaaacgctattagatggacgcgacaaagccctgtgaggatctttaggcgaagcctcagcaatcttgatgatgaaatttttctccaccgggtgctcagactcgttaatgttgccctttttaacaacgcctcaagaatccgatttgatttcgctataaagctgtagaggttgttgtagaggtctcaccaagccttgcccgtattgcctgggttgcccccccccctcccaacaagctgcagaacggaccaacgaactttgttaccttgtccttacgaacgttggcgtacgctcccgccaacacctagctcttcaggcgagacgtcacaagtcgaagtttgtgctaagccgaaaaaaagctaaccagcttcaagactgggtaattgggatgtcaccggggtcagacgcaaactgaacttccaccacgtctgatctctatttctttctcacggtcagcgcacaattaatatgctgctctaccaatgtaaaaatgtctctccaacagctgggttggtcacgctgacgagacacttacaccccgagttcaaatacatgccttgcagcagagagattttctccccgcaagtgctaccagagttgagcggggctcaaagagtgttgcacgcaggtccatacttagtaaacggctggttatgcaaagtgaccagttccaggtctgtgacatgctctatgcaaacggttattcctcgtcccacgacttgtctaggtcgacgatgtcgaaaatcttggaagatacgctgcaatcatagatgcacgcgaagcttcgcacggatcgaattttctaagggtacgtcagcactttcagcacttgacgtcaacctgcaacaatttgggcggtttttgcacgtttggtcaaaacattctgatgcggtttaacgatcgacttaaatagattatttccggtcttttgctatccgactcacaaacgtgccgataattccagttccagtgggcggcggaaatgtcaggaccgagacatgcgacgagcacgtcgagactgaaaccgctcaactacaacttgtggggtgtaaacatcttatgtgcttagccacgttcacccagcaagtagacaagcgaggaaacatgaccatggtgcactgcctttgtacggcacattgacttttgtatggtgcacgtcaacccacttcgcttcaacttgaagtgaattgacccatcaaatttatttactttagcactgccttgggtactcccccgacggacagcaaaaaggcctcaacccgctaatagcactttgcagtttgcatcgaacaatctatacacttgggcatcgcggtcaatcttctctcgcggcctctgcgtgcagctacagctcaatcttcaagcttcacatattgtagcacaagtcggtccattttcgccggaccatggttataagatctccgatcgaccgactcgagttgctactgcgattttcagctcgactactgctacaaaccttgggctagagttactgctcttcgcggtacctgcgacttcacatccgtagaaacttagcggcattaacgcattttgctagccataaagacttgaatatcgacatgaacgctttttgctagtctattgtgctaacaagccttacggttgtccctaacggatagctatgtgaaggattggactagtttaatgctttttttgctttacttgtcgccttttgcacgtaagcctagtatattgcggaaacctttatttgtcttggccttggatgacctaggtgaacaaccggaaaagtaacaagttaaaaacctcaatttaaaccctcaccctggtctacaagcagtaggccgacttcgtattgaccatttcgcggcaaaaggctacataaagcgccctttagattattccccaaaaggcgttagggtgtatctcatcgaaaagctttctgggcacttttaccaaagttaatgctagtaaccaattatcctttaaaataaatttaaaacaggacacatagtaattaacctgtcttcaaggggtaggtacccttgcggagttgatgcctcagcccaaactctattttttaatcattttccgacaaatgaagccattcctaaatactgacgaacgtcactgcaagcgtcgcagtgcgagtgcgggtgccatggtagcgaacgctatgtcggaagagtacactaagccttggcaggtcgcacgctgctggccctttgttggcagcattaaacgcctctttccgtttgcgaatatcgcatgagctctagccggtagagtactaggcggcgctcagggcatcagatagaacagaagctttcaggaacgcacccgtacccagcacagaaggcgggtgcgctcactttgataggattcactgttgcgccatatatactactgcattgtatgcaatagtgaaatgaagtaagaatcaaaggatatgttttagggcacggctatggaaaaccccgcgtccggatggttcctgttctgggcctcgaggacgccagcggaggatcagacgtgggggcagttctcccgtgacgcgctctcgcacttcgaagactccaactattaagccatgctgcagcagaagcttcgacagctgcgccaggtcggagacatcgaggagtacaatgggaaatatacctccctgattttccgtgtcgagagcatgagtgaagtggatcaagtcagctagtactgcgacggcctcaaccgcgcgacccaagcttacttcaaacttcagaacccgacaatgttgagcgaggcgatggaccaagcggacaagtacgagatgtctcacttcggggaggaacgcaagacggagcgtgagagatcggagcgtgagcattgcttccgtgggccaccaaggtcgaccgctattcaagacaggaagccgttcaacaagcgctcgtacaagcctggtcactacgcacctgctgagcagaccaaggaaggccctgtgtgctactactgcaagaagcctggtcacctcaagcgcgactgcaacaagctgaagaaggatcagggaaacgagacgccacgccagttgatgagggacctggcgtggcgagaacctgcgagcaagatttacccgtaaacgaggctacgttgaatctgctttgcgatgaccctctcctctacaatgttgtttttggtagttggagaagtgcgacaatgtgagctgaagcatgcggccaatctccttctggactgtggagcaacaaccatttacgtgtcgcgtggcttcggctggaaaaacaatttgaggactcacgtgtacgcggaccgaaccatcaaggttaagcttggtgacaacaagattggcgaggccgtactggagttggtgaagattaaagtccagcttcgaggtgacctcaactatctgtgcgttgctgtcgtgttcgacattcccgaggaatgtgactgttctcgggatgccgttcttcgtggatgtacaacccgatatcgactcagtcggagtgcgaagccgaagttgttgaaagaccgtctggagatgtggagattctctctcggagagagaagaagaatgccaaagcggaggcaatgtttacccttggagtcgttgactcggatggagtcgagacgaagtacatcaccaggctgcggaagtttttgcggttaccagcgaaggacgcgcccgagcacgatttcgtgatagtgttgtcgaacgatacgatcaagaagattgagcgagacctcaagcgcaatgacgagctggacaatgttggatcagagaaagccaagctattcctaccaaccgactgggagtcgttcaagaataatccggcgtatccagtgatcgttgggtacaaggacaatgtgtttctaccgggcggattaccaatggaacgcgacatcgagcatcggatcgacgtgaaagacccgaacatcgctatgtaccgacagcagtggcgactttcaccggagcaacaggctgagatcgactagtgggttcgtgaggtgattgccaagggattgattcgacccagtattagtccacacgctgcaccaacattttgtgtgcgaaaaccagtgggatggcgcattgtgcatgactaccgctatctcaacagcaacacgatccgacagagcgtgccgatgacacgcaaggaagatcttttcgacagtatcgctggcgcctacttcttctcgtgtatggatttgatgtctgcgtactaccaagtgcggatgaagatggaccatgtgaagtacacagtatcccaagcaccaaccgggttgtacgagtatctggtgctaccgatgggtgtcagcaatgcaccggcgacaatgcacaggctgacgtcgtcgctgttcaagggacttttgcacaccagatctttctatgacgatatctacgtgtttacgaagtcaaaggacatcaacgaacacctgcaagcgcttcgggacgttttggtggttctgaagaagaacaagctgtacgtgaaactgtcgaagtgtgtgttctgtgccgaagcgattccgcgtctcggtgacttcgtcggccgcaatggagtccgcattgacccggataaggttcagacaattcgggactggcctgttcctcgaacgcaagaacaacttcacagctttcttgggttgatgggatatgtgcagcggttttgtgagcaatatgcggaactgaccgcacctctgtttactctgctgaaatacacacagcaacaagaactgttggctatcgtcaacgccctcgccgcgtttcatatctactgcttggaccagctcgtgatgattgaaacaaccctctcgcaccagttgctgattcccttcagcgtcctctccgcggcgggcgtcgtcaaggcgtgaagttcaccaagcgtccggccgcagtacagaccacgacggtgaaagacgccaccacttggtggaaatttgtatgggattttcgcaccaccgacagacgacatgaaacgcgccatcattaaataaagcgatcgtattggccaaaccaacataaataaactgatttaggatataaatcgactagtttaagcatatgataaacataaaaagcatgtacgtgtattgatgttagatcttcatcgtcggaaacttcgggatagctttctcgaacgccgcaataattgtatccgcggacatcagcacccacgcagcgatcgtgcgcttgattaacgctaagcgtttctctttggcagtttccttgtcttcatcagcctcgaccttcttgtccttcttgctcttcttgtccttcttgttcttcttgcttttcttgctcttcttgcccttgccactttgcttaaccttcttgccgtccttgcccttggcacactttcggcctgtcttgcccctcgacttcttgaccaccttcttgctcttgcactcgtccgccggatcgtcctccgctgcagtcatctccttctgttccccgagctcctccgtgccttcctccccgccgtcttgcttccccttgtctggcttcgtgttctgcgtctccttctcctgcgtctccttgtcctgatcctctttgtcctgcttgtccttgtcctgcgtctccttcttgtcctgatccttcttgtcctgtttcttctttctcttcaccgactgctccttgggccacagtgctctcaagctcttcttgagaggccccatgacaccaacgtcaaggggctggcacaccgcggtgctgttcaccggaagcgacaccacggtggccccggtctcatctgcaaccatcctctgtccctcttctgagacgtggcagtcgaagttgtccaacagaaggacagagggtgcgtctacctcaaacttgaggagctctttgcaataccgtacccagagatggcgatccatccagccattttcttgaaatgcgtacacatgtcccgcatggtaattctttagctcttcttcctcaattttcccccctggttgagcacgcacaataaacaaaataggaagttttttgtctaaacctcagttagtaaaaacaattaaaccgtcgaaaaagaaaaaataatactaaacgtaccatcagcgcgagcggttaggactgccgtcattctggcactgtgcgttgcagtcttgtgaatctttgcagagcccttgcgaccctgaacggcccaaatcttcttagggggcgtatcatagtagatggctgtttcatctacattgtagatttctgaagccgagtgcttcaatccgtgtttttgccaaaactctaaagcaaactccacgtgagttaactccaaatcggcctccttgttctttgtagctaaagccgtctgcactgaaaaaccatggcttatacaaaagttgatagttatttatcaatactacccccagaaaaacaaaaacaaaaaaacatttagatcatcgtaccgttttgcaaacctctgcagctatctcattattgcattatacccgctttgttcgctcttcttcgactctaagtactgtacaagccaatcttgatagttgagcttgatatattcaagcatgtactgcgtgcaaagtggcttcatgacaatataaaaacccgattagtctacaagagtgtgaatattgtgataaacgcttaaccaacctcttcatctcgtctcatatccttcataaactttaccagtgcatgagataaggggatgatttctttcctaccctgtcccttaagcgtcttgttagtctgagcgcctcggtagccgaaaaccttggccaatttggcagcccaatcgcgcagatagcatcgagggtatcctaactgccgcagcgcagcagcttccccaacagcatcaatgagctgaagcgcttcccgcttctctgctatggtgtacgagcgttgcttgcgcggtgttgtgaccataatggtgtcaaaccggaaatgcagcgagccaacaccgtagaagtcaaagttcagcctgagtccattcgtttttggcgccaactaacgtgatacttattggtagaaacaaagggaaatgacagatttgattgggtaactcaagtatcaagtaccgctacctcattcacgaagcatcacgtggcggacgaataggagcccagcgagccaggacacgccgtactcgcgcagcgcttcgcggtaagcatcagcgtcagaagcgaaatagccatcggcagtgacctccagcaggaagctgtgaccaaggcgcagtggatacgggtggtacccagcaacgacgtacacaccagcaggttagtccatggacaagaggtgcgctgtggtgttggggccggttacgctgtccacgtgcaggttacggcgcagcgtatccccatccaattgcggatcgccacgtcgagctgcccgccgattggaccatttcacgaagcgcaacaggattggcaagactgtctccgtcgacccgtggtgtggtcgattcacgccagtcacgaacgagtcgatcaaggtcggagaggaccagccgagcaggcccagcgcgcgagcagcagcggcgagagcagcaacgccacacagcccacatttatcggcgtcgatggacagcgggaggccacgatcgcgacagaaacggatgaagctgacggacagcccggaatccttccagtcgtctacgagctggatcgcttcgctgaaatcggagcgctcggcgagtaaccactcacgaggctcccaggtacgactagccgaaccggtgtaacccgcccaaataactcgatattcgtaggaaccttcgacaccgcggcgattgacgatggaccacacggcgtagcggcgttcggcggcggcggaagcagcagcagcggcagcggcagcttggcgacgagcgagctcaagtggatgctggatctggcgagccgtcaagtcgacattcgcgcgcgcaacgaccggcaaagctcaaaccatggcaacccgatgagcggattctacgcgcaaggctggagcgagaaggacggcgagcgcacaaaggcggcggagcggcgcaagttggcaagtggcgagcacgagaaccaaggtcaaggcgaacgcgtgcaccaaggacaagacctgcgcacaagacaagaagacgaggccaaaataagacaagaatcgaagacgtcctagattacatatgcaggcccatccaagtatgaaggggtgagtgtaacagattatagcagtagatcagaattagagctagaacagattagaacggatattaatattaggtgctccagccacgtgaatggctgcaggagcttaggcttggggagaagccagcccttttggattctccccaccagcccctagcgcgtcttcctcctcctacaggttgtcttgaagtagtgggtacttccggctggggttgaccttagcggccggtaaacctacccgatgcgcgccattctcgacgaaatgaagtcagatggccggatcgtattcctcactacatgggaaccaacctgaccactctcacgaatatctgtggtcgagcgagatcaagaagtacaggtagtgcaagcgatgaagcctacattgacccagaagtcaaagaagagtaagagctagaacgacagaaagtagcacaggaggatcaagattactttgattaacaatatagttttttctctacattcgaagtaatgccaaccatgcctgcaagtagacacatcacaaggctaaatcatggtgagcagccatcagctagagcggtaccgggccagacaagtttaatccttaaactcgcctgcgcaagccatgcgcaattactcagcggagcaacatctcccagcgcgccgcgctcttggtctggccgctgctggcctgtacgaggttgccgccgagctagcgctgcctgtcgtagcatgccgcgccattgatgcttgttgtccctgatgccgacttgcaactgagctcaatgaggccgaggggcctgccgctgaatggatcgtctttgtcctcccgctggttcggtcacctctttatgcattatctgtgtggcatacaaacatggtgtgtgctgcacttgtatgactgtgtgtttttactattttggcgtgtggaagccccatctcctggtaatcttggaaacactacacacggcagcacggaggcagaatgcatagccctgtaccactatttgcaggaactcatggtgttaaacctactgttgttgggctgaaccataacggcatgcatgttatcacaatatatggagacaagcaagttgtatctacctctcatacaatccagaattgcataatagaagcaagcacattcatatttgtgacacgaggcggttctcagtttttcggcgacgacatgccattgtagaaatgacttggagtttgtatcggatggtgattggtggatgagttggatacggcgcggctgtacccgtgtgacatggatggtgattgtgggagagaagtgatttctcgggatgaatccagcgcctgaccacagatgggcccaactggctggaagtgtgaatcctgggagtgcacgcccaggatttcagagaacactcagtccagcctacgatgagtgcctaaagtctggcggaaagtgtctctggcgaatgtatcccagagtgaacctcatcttgctgtggctcagagtgccccagaggatcaaattaccctgagaatcaacccactaccaccatgatcatgcgcaggaggccgctaaacccgctaaaagtgtggctttgtggagatacacgcgagcctgcaatgcagcagacttgttacccagagtgccgtacgatgacccagagttcacctccctgagtgcaggtgacccagagttccaaagatgattctctgggtttggaccataaatccagactctctatactgagcttaagtgtttcccaagccaacacccaagaatccctacagttccccaagattcctcagaattcccaggatttcagaagatgaccctgagtgtcacctgattctcagggattcgagtcagttcgaagtcagtctgcaatcaaagtgatgcgtgaccttgaagaaccgttgtggatgcgcagactgaatactttcgaggagtcgagagggagtcctgcaccatactaaaccaagtccaaggacccacatttggcactttcgacgccgtgcgacaatgaattcgcaagccgatcgcaagtttggaccgctgaacccaaggtatactcaagacaagacatttgaccccaagcatagtgaacagaagatatttgcccgaagaagtaagagagagagagagagagagagagagagagagagagagagagagagagagagagagagagagagaagtagctgataaaagccaaacagagttcaattttccctgtactgcgcaagtgacttcggccaagcctgccgacggaaatccggaggacccgagactacgaccgcgggacgctaagggcacatcaacggcgaaggacagccgtctgtgtggactccatcaactcaagtccagttaggtggggaccagcgacggccttgagcttcctggagtgatccatctattccatatcctcgttgggtcacttgctgtgctcgtggtagcccatttcatattattccagagggtattctggggtgctaggtacttctctgggccacctaagaaacaacattgaggtttttagtttagcgaggttttttcaggctcacattcatttgtcaaaaatacgttagggttaggttacttagcgcgcgctaaaacgtcggggggcaccacacaaaccatgttcctgccaagccccgagcactcaacatcacaatgggatgtcaccccaagctcctctcagaagaaactcgccaaccttctccacctctcgaacctagccgtgggtggccggctccccttaggcgccaaggctgccaccagccgttactttttgtgtcaccgggacacggtcgcgcgcatatgggacttgcgccacacgccagacgtgctgctgcagccaaatcgccgccgatcaagcggcatccaccaccccggcatcgccaccaaggtggcagcagtgccgttgcctcttcggcagaaccagcggtcccttgctgccgccgtgaaggtctcccgcaccacccttcggtgctaccttaaaatggggttattgcgccggagtttttcaactgtcaagcctcgtctcacgcctgagcacaagaaacgacgtctggcattcgcactacgccacgttcggcaacccccaggtatgagcattttttttattttgtacaagcggttggatatctaataaccttgttgctgtattattattttattttgtacaggtcttagacggccaattttcgtcgatatgtacgatgtcgtacatatcgacgaaaagtggttcaatatgtacaaaggatcaacccactactacatggcaccttgcgaagatctaccccacaacacatcggtcaacaaacggtatataggtaaagtaatgttcttggcggcagtcgctaggccccgctatgatttttccgccgtaagtttttcgatggaaaaataggcatttgacctgtggttgagcgcgtacaagcaaaacggacttcggttaaccgtttagctggtacctgggagactaaaaatgtttcaatgacctcgaacgagtacgaaaatattttggtgacaaaattatttccagcaattcacgcgaagtggccaggtttgtcattatttttgtatttgagtgtttattgttaaagctaacgacatgtacattaattctatttcatgcaggaggcagaagtcggcgaattcgtgtgcagcacgacaatgcgagtcctcacgcagcggcttcgagggcagcagttcaactagccgggcaagaacgtccatgggatatccgcatggagtatcagccgcccaagtcgccggacctcaatgttttagacctctcagtcttctccgcgatccagtcggtgcaatatcaacagcctacctacaaggtggacgccctcattggggtagtactagctgcgttcgggcagttgccgagtcgaacgctggacaaaagcttcgtaacgctccaaaaggtgatggagtgtatcatcaaggctgcgggtgacaacaatttccagctacctcgcgtgagcaagctgtacatcaagagaggaatcataccaagctcaattgcatgtgattccactgtctacgaagccggcaaagtaacattaaaacagttgcaataaaatctaaaataattcgcccccatcaactgtttaattcttggtttaattcggagcccaccttgattggttgaaattggagcgcgttaaatgtttttcgtgacatatctacttatcagggtaaaaacctcacttctttagccgcttgtacgatgctatccctacctcgccagcgttcagataagcattgaatgcaatcgcccagtcgtgtagattgaccacgtatgcgctttggctattatcgccaaatattgacgaagatgcgcaaaaaaaacttattcactgcgtatgagcgtgttcaaagttagtgttatttcgctcaaatcgcttgttattgagctttaaaaaatacagtggggtgcagcgtgagcccggctttatttaaggccctgcttgcgtataagatgcaagaacagactgagatacgacgtcgggaacgagttgttgtttcttcggtggcccagagaagtagtcgcctccaggattttgtattgactgcttgtgtgaagggaaggtaactaatagtgattgtattttcctcctttattggaggtggtgcgcgtttgtgtgagtctcaggggagctaggcccctgaatttcagactcgagtgagcctagtgtgtgtctgacccaccgtccaagggtccaaaagaataagtgacggctagttgtagtgtttgtatactctgtatttgctggttttatcgagctaggagggcatttgggtaaggtgtcttctgagttccaggtcccggagttgactgaaatcctggaccctaaattcgtgatattctgggtttcgggggatctgattctctgggtttgcctttggtgtggaggtgtgctctgaagtagacgtgcactcccgcacttcttcgaggctacatttacaaccggtggagtaccgttccgtcgaagacaaacgagccggcagggattacacaaggtacctgtaatgggcctactttggctcactactttagcttacacgtgtgcgcgtgtatgtgaggaagcgtagcttagtttaaattagagttaattatactcgggcctccgagtatagattaatctaaataaacgatccaaataatgtttttgggttaaaatgagaactgctatttttgttttatgtttctgacttcctctaaatgtaatattctaagataggaatctgccaacggctggttggcagaattccaatgctatgcatgtcgctcattggctaagagatgctgctctcagcctataggaatcctaagtctctatggaccacccgtcgtggtggtcgtaaatgtatgtagcctttggtgtgtctacaccaaggtcgagaaagtcttctaacagacgtcgtatctgttagagttacaagtgactgtagccacttgtgcgtgtaaccctgttacagtacccacgccaaccaaggagtgtgattttcagggtttaaagcttcgcggctgcgaatctatgggtctatcttcttgctgttgactctcaagtcgattcgctgggtctacaccctggggaacagtcttgggcttcgctatacgaacccctgggcgacaaagatttcatcggcctcgcctcatttgctactgttttgtgcaagaaaaagtggaatcgaaataagataatgacagaccaaagaaaaggtagcagatatcttcacgaagtcactgacgtagcccatgttttgtaagttgcgataacgtatttgtcaactaactaacatagtgtgaataaaaatagagcggtttagtgcagtgcacgaaagtccccacaaatgcactaaagtactttagtgcacttttggggcacctgcacacactgatgctggacattagtacgtgcactaaagtacgttagtgcatttgtgggggctttcgtgcactgcactaaacaggtctaaataaaaacaaaatgatcgaaaattctctcaatttaaccctcaaacgttttctagactttcttcatagcacactttcaatggttccggtaaaaatacaaaactaatatttaagcgttaagttacaaattaaatgataaaccataaaaaacgtacaaaaagcgctaaaatgtctgcaagagtttggcaaactactttaattattttgataacatgatcatttactggggaaaaaactaattgacaaccaagaaatgcaaaattcgtgattttcatcaaagtgttatctacgtatctacctttaaacttatttttaatgattcagttgttcttgataacgtagacgccgtcaatgtgctagaactagacactcggcttctccacaacgttagcaaagtatttgtagtggtggtgctcaatgaagagtcaccaagtaccaatccgagcacggacaatgtagttccaggcgctgggttgctgtctggaccgctgaccgatggtgagcagggttgaccggcgggagccgacgaaccgcgatgctcgaccgcgcggcctaccgcgaaagcgcttgctcaaataaaatagccacgtgtccatttgctggaggccgatgtgcagtgcatgcgtcgattaggcaccgtcccgcacatgaccatggccgacggccggctcgctctccttgagcttgagcacgatgtgcctgatggaggcccgcctgaggaagtcgcgttggtgaagggcattgttcaccgagatcatcccacaaaacgacgcacactcacgcagggaatcttggtgttggcacacgatgaagacgcgcggcgtttgaggcatctacaatagtgatttgcgtcgatagtttagtatcaattaaaatagtgcaaaaccaaagtaatatcactatcataacagcacaccagtacaggtcgccatccatcaactgcaccgattcgataaacggacaaagtctgccacctagctaggcaaagttggccggacggagtgcaatgagaagtaacctagcactagtatactgctagagtaaacggcacaagtctaggttagaagctacaaatttagatattgagctacaaaggcaacaatcttttgattacagattacatgtatgctgccttgccaactatgtatcagtagtagtacttcacgatgcccgtcaccagcgagcgcagcaaatccgtcggcgtggcctgcggcggggtgaacgagctccgccacagatactcgttcaagtacatgggaagaagggtctttttcatgccacgcattgcctacagaaaaacagtcagcgctaaacaacaatacagttgatatgtagtatagagtcacaccttaacgtggtgcttcacccggatctcccagcgccctcaatccggttcgtgtgggcgcctgtgaccgggtccacgtaggtctcgctgtggttaacccacaggtgcttgtagttcttgtcacggagcaggcggttgttggcaagggtgtgcttgccaatgacggagacgtacgatgcgaattgatcacttataattgtcgttctacaataaaacaaattattgaaaattagcaaatagataataaaagtaaataattacaccagaaaaaagtgacgtacccggccttgatgtgcttcttgatcagcgcggacaacgtgggcttcgtgcgatcctcgtacgtcacgatgccgaaccagcggttcgttgtgcggtcgacgccgccgaacagctagtagtcggggaagcggcggcccctgttatacttcgactttttcttgagcgaggtttcgtcgatctccacgacgtgaccctcgcccccaacctccatcgggatggagagcgtttccttcgagcagatgtctctgcaataagtgtaccattgcatcgctgcctgctcgttcacccccaccatgtgcgcggcggaggtgacggccgtacgcgcacaccagtggaggagcaggcggacgagcttacgcagcgggagcttgttcttcgcaaagaaggagcccgtgcggacgctccgttccgtgcggcacgccgcgcgcgagcagcgccaacgctcgtgcgtgacgtccaaccgcatcgcgtgtgtgcacttggggcacaggagtgacgagggcaccagatgcacggacatgcaccacgccaacgtgtctggcgcgttggacgtgatgaccatcacaccgtcgaacgtggtgcgctgcaagccgcgcgccgcgtggacgtccaccggacgtggcagctgcgggcaaggggccgccaatggcttggctttcgaggatggggctctgctggagggcatggctggtgggctggtgggttggggtctggggtggcttgggcggcttgagctggatgcggagagtctgcaaatgaaagctccgcggtcgcggctttttgattttctcgcccctttgtggggctatacattttgcgcggtgttgtttgcatagattggcaatgggtacaacttgaactttagacctctaatgtggggctttgactgcatcctgacaatgagaaccacatggttgtaagccagtaggaatgctgtcatctataaagaaagctagataatctagaaagcgaatgctcaagctgtgtgtatctgcagtgtgcgtagcacgtcagcccacaccgccgcgtgagtacccttaatctcgtcccggcttgggactgagagaggctgtgaaggggaaaatcccaaggtcgggacatcccaccaaagagagtacacattctgttcaatatttggtgtgctgcacacaaatatctcttttttcctgcgcacagctttggtaggactaacacgtactcagcagcggagccaacacttaaccaccggtccaaccatctcgctttgaatcgttgctgtcaaaaacaattgctaaagtgacttggctgggaaactgcagacaattaatagtaccccctttctctggatgcttacagcaagcaaacccacggtcattcagaaatcgttgggggccttcgtcccgtttctggatagagccttcttttgtaaacttaatacactttactataaaattcaatgaattaaactatattatcaacaatccacaacctccacaattcattccactgcaaaattcaccattgaatcgccgccggcctccgcgattcgatgtcatcgcacctagcgccgggcactccaacttccgccctctatgcggactccgcggccgagcaggtcgtcgacatgacgctggccatcgacgcgtccaaggacgacgaggaggcgctggcgctactcaccaccgccgaggccccgctcagacacgcccccgagctcctcgccgcccccgacgcagcgtcagcggccgccactcccctcgacagcagcgccagctcccagccagcaacagcaacaacaggatcagtcccaacagctgcaggagccgccgccgccaccgccggcccgaagcccaaagccgcaggctccagcaacgtgtcggccgtgtaccgctggtacgaggtggaggagagcttcagcgccaagaagcgggaggagtcgtccatcgccaagtgcaagctgtgccggcagcagggcaaactcgagcgcaagacgtgcgtgcgcttcagcaagagcgtgacgtccaatctgtggcgccacctgaaggagaaccacccggacgtgtacgcgaagcacgcgggcgagaagaagagcgtgcagatgcaccgcgtgatgggcatcaagaagagaggcaggaagaagaaggtggtagcgcaggctctgcccactggtgctgatgttgcggtgtcagctgatgctacggctgtcaacggtgagcaagatgtggccaaggtgcagacacaatttgaagacggcggtgcgcagtcaacgactacaattcgcacgcctgtggcgaagaaggcgaagcgaggagagcaccagacgcacttgttcgcggactattcgctggctacagtggggagctcattgcatcagcagcatcaagcagcgagtcgaccggcggcggcagctgtagctggagttggggctgctggggtctcgagcgtcgctggatctggcaactttaaccccgagaaggtgcgcgaggcgttggggtacctctgtctgtacgaaatgctgccattcgagttgtgctcgagccatgcgtttcgaaatcttatggtggagtgctctggaggcgagggtggatacatggacgactccaacagctttgccatgtttgcgaaggagatcgcgtttggctacgcgaagaagctggctgcggaggtcaaggtgcgcactgtcatgcagatgaagatgacggacttctcgcacctcatgatatctgaatggcgatcatcgaattcaactggtgaacaatctagatctgcgctagaatctgcgtcgcccgcaggatattctcctcgcggcgacaatgacatggtgtttcttgcgctgtttgcggttgggctggaccaagagttcaatcctttccggcggtgtctgcacgtctcgtcgataggcagctaccgcataggccaaggcaaatcggttgcggcggagctggcaggagacaaagagctgaagaaggcgatgtgtcgtgtccaaccttgtcgatacatgccccaacttctcgctgtggaacccccgtgtagcggatacgacccctcttggacggaccataagctgcatctcttggagagtgtcccaacggtgctacaacaaatcatgattgcaacgattaatggagttgacgtatgtggcagctactgcctaggtagcaacgtagtcgccgacgcagacattgctggttctacgggtttccaatgtcggcgactagatcaaggtgaatacgtcgagagcagctctgcggcaatggcggtgggttcgtcaagtgacgctttttgcggcgtgtcggcagtggagactacttccagtattttggaagaactgcctacgagtcttacggggcatacgtaccgcgacctcatgaacaaagtcatgtacttggtagcgcatttcaagcaagcaccaaagtcgcgagtggtgctgcggaggttagcggtggaacaatcgactatgagcgctgactcgtttgaacgtttgttcaccgaccgcttgcgagaaatggcgatatcggtgggcgggattcattccgtactcgcgtttgttgaagacatgagagcggcactcaagaagtatttcttgttgcacaaggacaatgactcggacttctctaagctcatccagttgtcatcgttaactcggtacgagtgggcccgagttcgctacctcacggtgatactgaagccattcgccgaggccactgcgaagttggatggcgagaagtatgttgtgtcgtcgctgatcgttccctcagtttttacgctgattgaaaagctacgtgactctaatacagtcggtattggcccctccaacgccgcatctggaagcaaccttgccaaaaagagcaacacggaggcattggaagaagtaccagaagacatcgaggcgctgagagatttagcgtttgccaacttgtctgcgtgcttcgggcatttgttctcggttccagatgatagctggagcgtggagaagcgtcaaaccttcaacctgttgtggtctgctacaattttggaccctcggacgcggtcgttcattatcaagggttcgctaccccaacacgagttctgggatatcgtcaaatcggaggctgcaaacattgctggcaccaagatgaaagacaaggagagcggaaatgatattggtgacagctcgatctctttggacgaagacaacagccacttggatgggagcggtgtggggaaaagcaccgacctgtgggatgatctccaagcgaacctagcatcgtgcgcacaagaagaaatgctgctgagctctaaatcctcgttggagatcaccaagtcgagcaacctgctggaggtggaggtatcgtttttccaagaagaaggtcgtatcgtgttgcgtgccaacccgttggagtggtggcaaaatatgcgcatgaagtaccctttcctggcgcggctggcccgctacgtgctatccatcccttgcaccgtgaaggtggacgacaacccggtcctgtgtgacggaggtcttgtgaagcgtgggccgtcccaaatgagtatgtcagacctgtgcgacctactggcagcctccatgaaccttcgtacggagaagaattctcacttcgaggcggcaagcaagcaaatgtggtcgacggtttaaatggacggcagcgtagtcctttactacttctattatcttattgtttcctccgtcgcgctgccatctttgcgcgcaagcgttctttttgggccaacagcgcttgcttcttggcgtctaatgggtctgctgtcttactattatccgttgcgggcgcttgcgatggtaacactggtgcctctcgttgcggctttatcggcaccgcatcaggactcaacacgtgatttccagtgtgctgctgatctgctgtcggtgctggcggtggtcttggcggcaaaggttgcgacaatgactttgtgggcggtgcaccagtttgcaatggcatccttggtttttggtgctccgtcggccgaagggaagtttggtcgcgcgaaggttttgttacccctgttgcttttctgaaagcttgcttcgttttggagcgaggtccctcctgccataccccaccgaagttcggtagccaatctgggccgtactccgacttcgattggagctccgagaagatatctcgccgcttggtggttgttgcttcagctctgtcgtctgccgtcttggtcagtgaagacgatgttggtgcagcttgctcgcggaggttgcacttcttgtactcctcctctgtctgcaccatccagggtggcaccgccgccgtgtgtacattccccacaccagctccccacgacaccgacgcaattgagctcagtccttcgcctcgcgcaagctcagtcacgcgatgcacaaacgcggggccgtccttcccggcgtgctgcgtttccgggtggtcagcctgctcctcctttacgagttgatctatcgcccacggtatccactcgctcttccgcagctttacaatgccgcctccccacacacgcttgccttcgtgccgaccaagagggttctgcagcactccttcagccgacgagacggttttggagcgactcggtgccgtggccagcgccaactgtggtcccaacagagcctcctgctgatgttttcgggtcgccggccccaccgcagcattagtatcctccacagtccaccgtctctccatctgcacttcttgcagcctggaggcagcggacgacaaaaacgcctcgacccgttcactcgctgcctggtccaccggctccagctcctgcttctgctctgcagcctgttgttcctctgcagctcgtccattgttcagggccgcctcaagctgctccacgcagagcaacagccgtgagactccaccggttcactccaccggttcactccaccttgaggagagcagcagcgtacctctcgccgcttggccgcctgcagccagagctggggcctcgtctggcggtccgcatcgcagcggtggtggcggcagaacgcctccacctgcgccctgtgcccgtctccaccgaagtgcgccactgcgtcggccgtggccagcgctacgtcgcagaagacgcagcgccaccagttcacatcggacgcgagtgctgtggtggtcgcggcatcgcagagctcctgcagtttgcccgcgtgccgcagaaggaactgctgcgccgcgcgctggtggccgcgagagaagacgtgcttccgccacttgacggcgctcgagcggcggcacgcgacgcagaacggcgcctcggccacagcgtcgtcgccggccatggaccgccgccactgcaacgaggtgagcctcagctgagctgctcggattgtgtgttgattgtgtggtgcgttcgactaatcttcgggcatacgttgcacaagacagatgctcggaaagactgccgcagttgcggttgtccgctcggatgcccgctgcagcacagctgctgagcccgcgcgactcgctcgtcttgccgtgtttgcagagagtgctccgttcttggtgtggaggcgcgccagttgccttgtcgccacgaactcagtcgccagaggcggcggtcactgcggtgagcaaccaacgtgcgcctgcagagcaccgccccgaaatgtacaatgcgtcgaatgcatcaagcaaggggctcacctcaaacggtgtaggaccgtcgatctcggcgagctggcggcggtgcgttgtaagggcggttcgttggctgtgtgcgtcttgtaagtgctcgctggtggtcagcatggccgttgcggtgcgttagcggctcgctccatcggcaccagcgccgcttgacccgttacaagtgatgatctctgaaaatatccagtggtttcgttcgatcagcgagggcttcaacgcgcttgaacgccggctcgcggcaccaaaatgccagcgaaatgagcgttgcggcagcaggttaggaagagctgtcgggcacacacctagaaatccgcgattgcgccccgcaggtcgccgtgttgcttgctccggcatcatcctccacgtcatgctgcggcggaacttggctgctgcctggtatgctacgttagctgtgtcgatccactgtggcaagggattgtgggctaaaacctctcggctgtttcatcaatcagccgggtgtcccagaaagagtatcgttctgaaacagcacttatcgacgtgagtatgtggacgtccccacttattacggaacgtcgcctattttctgccccgtctcgaccgtgcacatccttcatcttgattaaagtatacggatctggcgctcagtatgtcagactaggcttcactatgctcctggcgaaagtgccagagagcggaacgcacagagatgacacaagtcgcacacagctgcaccatcgccaaagccagatcagccctcggtctctgagaccggagagagcgagggagaacagctcgagctccacggacggacggcgccctgcctcgtcctgccgtcactcgcaccgtcgagtactcgcgcgcttgctcgccgtgtaggcctctccgcccattgtggggtcctcctcttcctcggcgatggacgccgcgtacgagcggccggcgtccagctcgtcgtacttcgcccgcccgcccaagccgtgccgcctgctgctccgcgtgcacgcggccgaggacctgcgccatgtgtccagccacggcacctactgcaagctctacgtgggcggcaccgagatggtgcgcggcagcggcgccttcgcgcgccacacgctccgactcacgtcgtccggctcaagccacagtctcggcggcctactgcactcgccgttcgggggcaacacggccgtacccccgaccacgccgctgcctcccacgtcctcgtccgaaggggacctgggcgccagcggcgggggcagccgcatacgcgtgctcaagacgcaggtgcagaagggcaagaactccaaccccgtctggaacgagaagttcgacatccccgtgctggacccgagcgaggacgtgctgagcatccgcgtcaagtcggcgcggctcatgtcgtcccccgccatcggcgcgtgctggatctcgctcaagcacctggcgctgcagggaccggcgaccgtcgacaagtgggtcgatctcaagctcggcaagaaggacgcgggccgcatccgactacagatgagactcgttgacccctccaagcccaggatacagagccgacaccccgagcagggtgagggtgaagacaccaccaaccgaccgcgtaaccaccagatgagcgactcgtacctgagtctcccggctgaggaatcccccgaggagatcgcagcgcgggcgttcaagaaggcctcgcgtcgcgaccacaagtaccacagatctgctaggcgctttgacggacgaccggtgaattcaactgttctgggcagcagcggcggcagtaaccgttcgggaagtgacaaggacgatgaccagaagcggtcccccaccacgcccaagacgccccgggacaatagtgctagcgcgacgtcaaacgagtccatcgatgactcggaacctgccagtgatgtgtccgcctcccccgtgacctcgccactgccgaagcgagcgtcgaacgaagacgccgcggccttcagcgacctagagtcgccgtcggcagtggccagaccgcccccggcgactgcagtgcctcccccagtggcagttgcaaatggaatggatgcatcgtacgcaaatcgcggcaccatgatgaggtcagagctcggtaagtgaagttggttgattgtctctggtagcgcgctatactgtgaggctgacgttttgtgcttatgtgacgatttcagaacgctcaaagatgaagatggcggagatctcgagaacgtcaagaatatcgcggtcatcaaggtcctcgatgtcgtcgtggtcgtcgaacccccaggctccgcaggaaggtgatgatgatgatctggatgagtacgacaaccgacagcgggtaagtaagcgctggaccggtaatgattcgaagttgagcgtcttgtcgagccacttggatcctcgtgagagttcacgcatggatttcgacgatgatgagagagactcgctggacaagaggaaaaagtctgcgaacaactcggtcgcgctttcgagcacggcttccagcactcttgaccagcgcgagaactcgcgatttagcttcagcgacagtgaaagcgacgaggaggaggaggaggccaaatcggacaaggctcgcgagcagcaacggcagcagtggcagatggagcagcgaaagaggcagctcgccggcatcaaggaggtttctcaatccatgtcggacagtgagagcgacgacgattttgagtcggacgacgagtttgatgaggagctcgagcgggagtcgacccgaatccagttcactccgactatcgcaaaacttctgtgccgcgagagcatgaacgtcctgatcgaggaggaggacgatgatgaagaagaaggagtgggccagcagaccctcaagatgagcgacgatttcgtgcctattctcgaagctacgtcaccgtcgtcagtggactcgatggactgcgcgctgcgccggtcaagttttgattgaggccgccctcaaccttatttactagcccaacaccccaacgagagcaaggatgaagttgacgcctcgcatcgaaggagtactcaaatagcccagtgaagctcgaagctattcgtgctgcagtacagcagcataccgagaccccagctagttgtcatagcccggtgcgtcaattttggtgtatgtgtgtcacctggcggacgacggtgagctcgcgagaagcttgcgctcctcgcccacttattatttcatagatagtagtatctaacagccaccagcgagcaagcgagcaacttgagctcgaacgcgagcgagggctgcaattgccagtcgtagtcggtccgaataatattatgatgaccacaacgctgtagccatcttccgtccttagttcagcaggcgcgtcgtttcaagattcagagctctcgtgcagctcacaagccaagtaggtgtcgatgtcaacggagaaccaagcggcaacttgcatccaggcgcgattccgaggctttcgatggcggcggcagcaacgtcgaggcattgtgagaaacttttgattgcctcagtgctggtaacgggacctgttgtcactcacctcgtgcgttggaatcatcggacagagagccgtcaccaagattcaggctctgcagcgtggccgcttctcgcgtcgagagtttgctgaactgcgaaagttctctcgagagcaggtacagtaagaccaagctccaaatgcttttgttccttgcgatgtctaacaagtctgctgaaattggtattggtaacaccgtgtaggaaagcttccagcaagccaccaggcgtcggcagatccggatctggcgcaacgagcaggaactttacttcttgcagcataccagtgcagcagacctagagagggtgcgagttttccaacagcagcactccgcaagggtgcttcaacgagcttggcgcgctacgacccagtcggcatcccccttaaatgatgacaacactgtgatccttgatccaagcgaccgtatctacacgttcaaccctttggagctcgaaacttcgggcgctaaagcccagtttagtcgatggaaacatgacgagaaggccactaatagatcgcaacgctcgctctcacttttcttgagcaaggagcagtctgcatctgctgcagcccacacggctccatcggctgatgatgaagcatttgtgtcaagacgcaaggcaatccaggaacggtatgtgcattgtgtacttcctatggtctacttcacgttaaattcatcggtgatctcacttgtgctatttgctgtggcagcatcaagcggaaggcagcacaggagaaagccaaactcgagtctaccaccaaacagaagcgtagtggtgtgacggagggctcaaagctagccattaaccggcggcgggaattgtacgagcaggtggtagccatgaagctcgccactgcgcagcgtgtgcatcgccacgagcgcgaagctcgtgcttctcgtccagaacgagatctcttgtcagctcaactcatagcaagctgtgataatcgtctgaagcaccttcaaagtgaagcacccgaacaaatgacagccccgaaagaggacaaccagcaagctgcaagtcaagtggagaagtgggatccagcgagacggattcaggcttggaatcaccaccgccgagcagtgtgctcggttctagacaaacagcattggtggcagacccagcttgctggtgacgagcgcgatattcgatgcatggtggtagcaaaaagtccttgggaggacgagaacagcatttgggtgtggcctcgcagtggacacgacaaccaaaaggaggacggatctacaagttcaacagacagttcctgtttggcttccttgtggccctccgaagaaatccagcgtttcctagtaggagccaaaagcacagaacagcatcatcaaccgattaagcctgttaccgacgacgaggcgtctgaatggtggcgtgctcattgtacgcagtcacacttggttaccagcggggctctgttcattgagaacctttatagagcagagttccgcagtaatttcaggaacgagggcgacgtcttcccagtgtgcacgtcagaggtggtcgctaatcgcgatttgtacgagctacagcagcgagcgaagcgtgctgcacgcacgaagagtctagagcaggacattgagcagcgaattaaagctttgaccgcgcaagttgagcgccgcgtccacgaaatggagtctcaggtcgaggcaaacactcagttggcactagaaatcgcccaacgaaaggtggaacagcgagctcgcatcacacgcgagcagcaagcaacaatgacgatacaacgctatgcacggggaatgcaaggacggaagtgtgcgcgtgagctgagggccgagttctttgtgatggttcgtggtcgtgcaattcgtcgcggacggtgcgaggagtgtggggatcagcgtgctgtactcgagtgccagcagtgtgaggaaagcttacacttctgtccgatctgttgggtccacgtgcactccacgcgaaggcgaaaaactcacgtagcgataccaatgacggctgttgtcgctccggtaccgatgctggaggctgaatctgccaagactccaaaattactgaagccaacggagaacgtgaagatcgtcggcgttgaagaaaacaccaggccgcggctgcgatcccttccatctccacccaagcaaattgccactcgatcggccctacatgcacatggttcaagtaaggaccgcaatagcaaacccgccaagcaagacgccgttcaaagtgcaacaccagccgaaacacaaaagaaaacaacactggaactgactgaagcatgtgcgctagcacgtcgcgtaagagcggagacgacggagcgacctactgtaaaaaatgacgtcgagctcactcctgctcaaaaccacaacgccacacaagaaccaaatggcgttactgaataccccggcagtttgcccaatgaagatgcctcgctgggtggcgagatcgacttctcaactgctgccgatggcgacggtgccgttgtcagcgagactgattctaacgaagcagcacccaagtctgcccagcattcggagacccaagtagttacttcaacatgtataacgcctggccctgaagacaaggcaacccaccatgagctgccatcggatgcatcaccatcgaatgaaatcaacaacatcgatgtgtccactatggagcccgcagaggagcccactgcagtacccaccaatacttctgcaggcaaatctgggggcagcacggctgatgaaaacgcaaatgcaagcgttcccatcagctccacgattcctgaggcccaagtagcggaatccgcatcgcgaagcgagcaaccagaaccgagtgaaaaacacaaactccaagaggttcccccggccacagagcaaatcagagatacaagtcctgtcgaaagagttgaagtgcccacatctagcgatacttcaggggaaacaactaaggagttagcatcacaggaagctgaagggtagcttcacactcgtccatacactgttaaggtactactaccatggcaggtgagatcaaatactcgcagctcagaaacaaaacaaaagggctgggccggtcagctgctaaatatctacgttagccatcgatcacccttgccgtatcctcctcctcagcagcactattgcgtctaacaggtcgccaccatttcagtgcgccacttatctttccgccgcacgcagcctggtgctgcgcaattaagcagaagcctccttgagagccttggcctccttctcgccatccttctccgccagcaccttcttgaagcggttgacctgcgaagcgaacgcctggttgcacttctccgtgaacggcatgcgcatgtcgtaggcgtcctctccgtcggcgtagtatcccttctcaatgtcgtaaaccctgcagcaacagagcaagcataatccaagtcagcgccccactccagctaccatccatgttatcgcttcacgtactggtacttgagcgtcttgcggtacaggtggatagccgccacgttgccctcacgcacgtggagcgacacgtactcggcgccaaagctctccaccatggcgcgctctgtagaatagcaaacgacaccatcaacctgtcagacatcctcattccctccttccttctcagcagaacagctacgtacgggcagcctgcatgagcttggtggccaggccgcacttgcggtgcgtgcgcagcaccgccagcgacgtgatgtggccgtgcggcaccgacgcctcctcctccctgcagcagcaacagccgtcacgtcagtccaaagcttcctccctgtgttgatggctggcttagaggacgcacatcttggccaggacgtagccgacgatcttgccgccgcgctcctcagccacgtagagcagctgaggccacgtcatgatgtggtagtagtagtacttcatctggtagttctcgggcaggcaccagaggttggagttctgcacctgcagcaggtcgtccgcctacaatgacacaccgagagggggggccaccacgtcagttcacgatattgcgcagcctgtagggggcttcgagcttctccgttctgcgttctggtagatctgcgtgtggggaacgcagctacgcaacgctcgagcccccacgtggagcacagcgcacgcaccgtcgcgttccggatcgacaccatgttgccccgcgtttctggtcttgctcaatacagatcgcgctttggatggccgggtgtgcattgcgcagtgcgcactcagcttaagtacgaatagaccagccgcttcatcccccttacaaacgtcaagtctaaacaatcactctgcacttccgcactgggcgtccgcttagtattgaatttcccctctcctccacaagtccaagccagtcgccagcgtcagtccaaggccccgctccaaggctccaaggctccagctccagctcttgctcccccagacgaaccccatagtgcagagcagtatgagcgaggcggcaggcgacgccctgaagctgcggctcaagctcaagctgccgcgctccatgtccgtgtcctcggcgaccgaggaggctcagaagaagctgctgatcggtgcgcggggcggcgccgccgtcaaggagctgctgagtacagcacccaacatcgaggtggccatccgcgacttccaggcggcccacggcgtcgcggaagcccacgcgcagctatttgtgcgcaagaaggagaagaggaaggagaaaccaacgaccttcgctcctgctgtgcagctgctggatctgctgcaggtgcctcgctccagtgtgtaccagtcgctgctggagcagatgaagaaagagatgctgctacgtattgccgatttgcctcagagcgagctgccccgcgtgctggagcagacgttcccatacattgaattccgagagctccgagcgattccgattgcggtgctggcgagacaggaggacacacccgagctgtacctgcgcgagctgacggagaaccggcgtatcctgtccgaattgcccgtgcacgtcaggagaaaaatcttgcaggtggacagaagagagctgcagctcctggtggaggagtgcacgcgcgaatacgtggctgaccagctcgagtggtatctcaaccatccgacgtcggggtcagcgacgacccatcggtcgttatcgaggagaaacagcaataatagtatgcgaacgggaaaccagaacaggaaacgcagcttggatgaatcggccggcgggagtctgtggaatgtctcgagtcacgttccgtcttctgcggatgctgctggctcgtcagcatcagcgtctggatttagcagtgaacggagaccgtcgtattcacccgatgaacgtcgtagggataaccctgcgctggtgaagctggtggagatgcttggcgactcagagccattgtatttggcaactttggagatctggcggaattacattgtgactgcgaacattcccggtagcgctacaaataaccaccctaaagagtatgtggactatgtatccctgctgggtgcgatgcgcagtgaccttgctaaccttcagcgtgacaagacaacgccactccttcggacggacccactgcacaagtttatctggtttttggatcgcgcgttgaagaaccagacgctcgaaatcactcagctccacgaactgctaggcttcattggccgactacgtacagcggaccttccgccgaacaagaagtttcgcaagaaaggtggtgcagaagaagaagaggagaattttgaagtggtgttggggccgcctcctgtggacgagctgcttgctgtattggacaagattgcaaagatcgatgctcgcttaatttttgcggaaccagtgccagatgacgtgcccaagtatcgagaaatcatcaaggatccaatggacctatcaacgatgcgaaagaaagcgaagcggggcaagtacaaaaccctcgattcctttgtggcggacttcaacctcatgattcggaattgcatgacgtttaacccggacacgactatcttctacaaagagggaaagcgcatcgggaagcgtggcaatgagctgattgagcgacatgctacgtcgttgcgcggtgaaccccagcgtattcgcacgaaaaaacgccgcaagactgcaactggtcccaccagcgaagcactcagcatgcttacgagctcgggcgtcgtgacaatcaaggatttcggagatgtggaccagtcaggaatgatcccggagggcatgtgcaacgaaatgctggcggatgtagcgctgattttgtcggacccgctcgtgaagcagcttatttgtgacgctcttatgaaaaacctggtgctgtgctggcaaaagagagagcttcccacggacaatcttatctgccgcgcactcgtacagcttcttcaaattggaaacccctccagcgtgcgccgcatgattcggaagcaggacttcgtgctgcgcgctccgcaggtggttacgatgcgcgttgtattaccgcttctcttgcgtacgatggtcggtttccgtgtgtattacgcattcccggcggggctgcagcgcgacttgaagacaaaggcgaaggaggacgtccttggggccatgctctgggacaacgtcttgcgtgcgagctcggcgattcgtgccatggctaagtcatttgttgtgcagtgtctagtcgacaaccagatcgatgcgggggcccagctgcttcatcacttggtatcagctgaggacgaatcgcttctacgtgatcgcgtacttctccatgcagtggcagaagtattactcgagcaggtgaaggcggtggcagctagtagcaacagctccaacagtaacgatggtggatcgaactctgcagaaaatggcgaggtgacgatgacgctaagcgagcagctgcaagcactggcagcgtggaagcagattttcgacaagtttttcgtggaagttttgtcaaatcgcatcctagctgctaagaaggtgacagggtcggtcgtgcatttcgccgatggtgaaatcgatgctgccgaggaagagaacgagggggaaacatcctcaaagaagctcaaacgacagcatgtggtaaatagcttcccgattcaagttttccatgagaagacagcaatggtgctgtcgtcgctgttcgctatggttgagaagggaggtgctggagctggtgttgacgcaatgctctcctcatatctcagaaaaactctaggtgtgttgcgcgagtgctgctcttcatttgagatatttgaagcgctttggaatagtccggtatttgccggttgtcggctattctacgagcccctgctgtccaagtgccccgtcgttcaaaaagagttgttcgttgtactgccatccgacgtcaaggctgaagctatcgatgaacagaagaaggttgccgctgacgtcaaggtaaaggctgtctcaagcgtcaagctggaagctgaaacgagcgtcggtaaagctgatgacgctgatatggctgcgaagtcggagaatgttaaaactgaagacagaaacgcgagtgcacacgacgagaccgcagacggtagatcaagtgtacaggaggaaagcaatggcgctagtgacaaagctggccctgctgaaacagatcccaagtcggtatcaacagaggtcgaggcgaacgaagagagcaacgataccgacgtcaagatggaggatgttgaagaggaagctaagccctgtgctagtggttcagaacattgcaccagcgaggctgcaccggagccgttgggtgaagtctccccggatgtcacgactgagaccaacgcaagcagcgaggccacggctgaagtctcaaagaaagaaagcgaggccgtgagatcagagaatgtgactgatgaggatgtgaatagcaaagaggcactcaaggtggagtctacagaggagccaaaagaagacgtcgttgaaccacacgcacggtcgacggaggaaaagacgaaagcggagtcgtagcgggtggagtggtctaaaatatcaaactcccattttgttacatgtatgtgtgctgaagttcttgtttattgtgtagcacagccgattccatctacagctccttgatttactcaagcagctagtctagtaagttactagactagctgcttgagtactagtagtaacctacagacaaggaccggcatctacgcccctttagatttactagtagtttccacgagtcgttgcgtcacgccgttgccactagcgaaatcgagcatcgaaagtatccgtaacgtcagtgtttcgttgtggcaaatgagaataggaaaagtgcacggcgtgatgcagtgcgcctgtaggtgtttcaaaatgcttgctgaaaacgaagggaaccaaaacggaatacattttcaaaacaacttacaaactactgagcgttcgcaccaaacaagccagattgacgggtgcggcagcggctcctcattgccggtggcggcgacggagcccggcttgggagacgcgtggagttcgtagccgggagtgccggcctcaatgtccttcatggtgctgttaacagtcctcgggcgcttcagacgggggtcgagtggaggaggaggctttgctgtagaaagcaaattgaggaatgagctgctgcttcagacgcgtcggcggtgttggttgttgcagggacagagcggagacaaaagagaccttgcttcgtagatttatgtgcaacgccattggtgcgctggcatctgtgccacagactgtataactcgcgtcattttgttggttaatttgccaagtgtacgtttgcagttaaaacatgcatgaattgcgagcgactgcacatttatagcaagctactagctcggagctcggccattgttgcgccgcttcgacgccttttacccaagcagactttgcttcagatttgagggggaggagctgagcagggctcctatttctgaaccatctgggctgctgcttggctttcctgagcaaaacgcgaaagctctgtaacattttgcttcaaccacggcgatcttggctcagtttgggtcagctgtggggtaatttaggggaaaacgtcaaaaggtgtatacgttgggaaaactttgtcaataggtgtagtggtcgtgggcgtcacgtcgcgtcatatctcatcacacacgtactgacacacgttttggttgccgcggtatttcggccgaggtcgacccaggatcgagcttccaagcacagtagcttattaacgacacgctcgtagcgaacacggtcaactaataatagcatatagagcaactgtactcgacaacttcgctattgtggcttcaaggaactaccaacgcaaaccgcaagcgtctatagcatggctgtactaggtagcttttgcatctgaatttcggaggtgaaggagctctagtgagagcccccaaccggaagagagtgtaggtattgtagaactgtggcaacgctgaggcctggctacgatggataacgacgttcattgtagtccctcagccgtacaattcgctatcaaagtcatggacaccacgaaccgggctagttgcatcaggtagaagccttcctaaccccgggttttatggatttggatctaagcccacacaccagtcaccgcattcgttgctgatgcagctttatcatgctccttagtgcgcttggaaccacatacacatactatcataccgacaacctagcatacacctaatgacacgagttaaccgcttttgacaaaatgtttcaaattcatacaccttttgacgttttcccgtaatttagggttcgcgaccggaagtgcggacaaaccacaaggcaatcagatttgagtggaagcgcttggacgcttcaagttgaagtaatcgctcacgttcaggcaaatccggcgggctcgcccccacggcgaagtcgagtcgacttctgtgaaccggcccggcagtcttctatccctgtgagcctcacagcagtcgccctcacagtgtgagggcgactgctggaatccctcgtccacgtagcgagtgtgggaagagcgtgtggtgaacagcatccagtgcattcgatgcaatctgccgcattattactaccaagggcatggctaaagtgttctgcagttgggcaaagtagacttgcagcgctagggagaacggccaagcgctacagaatccagcagaagttaaacactgccgcacacagcctcgttgcttttacatgctgtgcatgtattaatacatgtacatggattgcgattgtctgacggcaggatagtgctcagcacgctgcccccatcggcaggttgaattgaggagatgtgttctgacttcattccggcaggcctcgcggtgatgcatcaacaaatgtcaactcggaaggtccgatgggcatgatctccatttgctctcgaccgggcctgtgtcagaggatccaagcatcatgggtgaggttcttgatttagggcttgttgccatcaagttggtggtcagaatcgacgatgcttcgtcgaagtacactggaaaagcaggcagatttgaaaatggtcctaaaattgtccttttcgcgtggccgatcacggggggggggggggggtatgtacgtacatgtatagacaaaccgttcagcgcttcacatgtacactcgtggcaagaatcttcggtatgtgatacagcgcatgtactgcagcgcccaaacaagtctcgagagtcgagacccgcgctgtggctctgggtaaagtttgtccgttccgggggaagtcgttacctcaacataagcaggggaatagggttttggggaggggtgaaaccaaacccatgataccaaaccaaatgaatcttgctcatggcaagccccaacaagtagcggggtcaaaggggtgcatcattaagatgaagcatattctaagcttttcggggtggtgtcgtgggcaacaggctatttgttctaggcgccatggcatctctaacccgagcttggcactatctttcaaggatttgaggccgtcccggccattatttctcaagtcgctttatagagtgtattgtgttgctttgggctgttctgggagtgatatgttgctctcgtgtcgctgtaagagccgtcatgttgtcgaaattatgttgcagtaacgccgtccgttccggtgaccggtacttgcgcatcaggcgtacatttgcggccaacttcaacagcgcggtacacaccgtacacggcgagcgcgtcggcatttccagttcacaaatcgcccaactctgcagaaaggcacagagacgaattgaagagacctccatcctgaactgcagtgacttgcagagtgcaatatgcattctccatgacacgagagcaatgtacgcactcggctggcaaccactagggtcttgtcatgcacgagcagtgacagctaccacagcccttggcggcgttgagcaagagttcttctgagctagccaatcatatcccttccgggaagcagagagcaatcgacttcagcaatcggatatgcgtggaggcgtttttgaggggaagttgaagttggatgatcgtttaacagcactcgaaactatgtgcacaccctcggactcggaggctccgggatccgagtcgaagagcgcggatccgaatcggactgatggggcatccacagagtctgtcgaaatcagcgccaatgcgcagctcgcattgcgcgctgcaagatgtactgtagtacagtgctatagttcgacgaatgcaataaataaataaatactgagctggaggctaacgctaaataggcaagggttgcatgtcattctgctagtcgccttcttgtcaatgcgctgaagcacgcagccagcgcctgcctgacatcagtggtggcgatacatgcataagagatcggggtaggccggctcaagaccctcaacagcggccgggctcggccatttcctgcaatgccactttcacgagcacctctgctctacaggagcagggtgcagtgcagctccgcatctccttcgaagacccttggcgcatatacatggcaggctggactgctctatctgcacgtcgcttcaggatccaaactctcgcctgtgaaacatcacgcgatccagcgtgtttacctgcacaaagctggggggggaggcctgcacggcgaagttcaagccaaagtgcaagtgcaagcctccacacaacaatgattgccatccggtgaagcgctacgccgagaccgtctgtcagttttgatcccactcacgattaatctatcgtcgtcgccgcgtgatggctcctgcaaaaaagactctggtcctgttcaaggatttgctatatcgttccttcctgccacagtcctacaggctggacatgttaggctactgcaggaccaaagtgcagctcggcgctgccgagtctcggcggaatcccggcgatcgacttgacatgtgctaggccggaaggctgcaagtcctggcgacttgcccggtgccgtagctattctagctaggatctaacgaatgtatcgagacttcaactcaactgagaccgagcctaacaagacgcttggctttagcccttgaccgatttgatttgccgaacggcagaacggcttcctggtcgactcgcactcctcaacttgcttcctcccaagcaccgccctccagtcggaaccatgaaggacatcgaagccggcaccccgggctacgaactccacgcctcgcccaagccgggctcggtccaaggcgacgagccgccgctcacccacccgtcgatctggctgctgctcgcggtgtcgatgccgcgtatggcgatcaacatggcctggtcggcgcagtgggccgctctgggcccgtacttgtcgaccatgctgtcgaactccgccgtgcaagcgacgcagttcatcggccccattgtcggcgtcatcgtcggccccagtgtcggcgtcttcagcgatcgcaccacctcccgcttcggccgtcgccgtccgtaccttgtcgttgctggcatcctcagcgttatctgctggatcgccatgggctacacgagtgagatcggcgaagctctcggcgactctggcaccgacaaccgcacgtggacgtcggtgttcacgatcattttctacgcctggatggacatcaccgtcaacatcgtgcagacgccggccatgctgctcgtcgccgactttgccggtgaccggcagacgaccggtgccgctctcggccaggcctggtcgacgctgggatcgatcgtcgtggctgtctacatccgcgcatttggagctgcctacctcactatgcactggttcatgggcacgctgtccgtcattatgatcgtgtgcgttgccgtcgcgaccattttcgcccacgagacgccgttggaccccagcaagttggcccagtccactgcttgggcccaggtcaaaggcgcgttctactcggtttggcttggtatcaagaccctgcccccggtgctggtggtgtacgctatcggcttcttcttcgtgcagtacggctacacggcctacaacggcaacaaggggcagttctttggccttgaggtgtacggcggaacgtcggagaacgccgacaaatgcgacccctgctcggacgagcagaacgcctacaacgacggtgtcagtcttgccggcggcgacgccgacctggcctacaacattgtcggctacgtgtactcgtggtgcctgcccttccttgtaagcaagatcggcctcaagtgggtgctcacgctgtccaccgtgccgcagatgttcctgctcatcatggcctgggtcagcaacaagggcttcgacgtgttcgtcgtcgctatctgtggcatgacctccgccgtctggttctcttgcatcgtgccggtcattatccacgtgatgggcgacgacatcgagatcggcatgtacgtgggtgccctgaactcggccaactgcttcggccagctgctcaacttcgctatcggcacggccatcgtggacacatcgctcggctacaagctgccggtgttcctcggcggcatcatgaccacgctgggcttcctcacggccgccatcttcatgaagatcaagatgtacagcttgtaagtagtcggtgccggcaaccgtacgcacgtattttgtatgcgtagttaagcagccttagcgtttgaaactcgttcttagttagcacggataacaacggaataggcttgaagtttgttcagagagtgtcaccttcgttgacaacttgtgttcaacttaacctccggaaaaagctcgacgctcgagcggctcgagacgactgtgggaatgttttgattgcctgagggtgtgtctggaccttccacttgattcatcgtgaggagctctctgacttctgatgcggggggcttcgaccgagttggccccactctcgaagggcgacggcaggaaagtcgttcggaggaaaacttcccgaccgtgagctgttgtgagcctcgcgccgcgcacgtcctatcggatacattgtagttcttatagatccagggcacgcgactagtgcagagtacgcagtcgcagttcacgatcgtacactagtgccgagctgtacaagaccaagatccaaactttcggcagtctttttggcattttgctaactcaaaggcccgtaatccgcacacttgagtggtacagtaccatcattttttgactcagaagtacttctgagtcagaagttagcaaaactttcaagtcaccacgatgcatttacaggtatcatacctgtaaatgcatctgaggtatgtgctgcagtggtatgacacagacaactgcctctttacttgacacggcggagaataatggaatcccgattcagggttcaggattcctgaaccaggatactttcctgataacctataagaaataggattcattgaatcctaaaaaagctaggattcattgtttcctaaaaccaaagctgcagtgttcacgtcgaaagacaactagtaaaataaaaattaaccgcacgacctcgtctcgggggccttgcaggctggtcggatgcattggctgcctctgtggtagtcattgagagacccagttgactgccgaaccgccggttttggtgcgagagctcctcggctcttgttcccggaagcgatcctcagcagcgctgccacttcaacgtatcctccagcgactgcgcgagacagcggcgtctcccccgctgcattcttgactgtcggtacagcgccactggcaaggaggactcgcacgacttccagtcgcccttgagtggcagcaagaagcaacggcgtgtccccgttgctgctttgggccttgacattcgccccgtgactcaaaagcaggtgaaccacctcgattcgaccacgcagagctgcggtgaagagtgcagtgtatccgcgcgttttgttgggcgcgtcgacgaacgctccgttctccagcaagagtcgggccactgcagctcgtccgttgcgagccgcgatctccagcgccctgttgccgtcaccattgaccgcctcgacagtcgccccgcgactcaaaagcacatcgacaacgtccacgaaccctcgcttggcagcagccatcaggggcgtgtcccccctccactcggcacaatctacgtcagctccgccgacatccagcagcagttgacacaccgctacgtggcgcttcaccgccgccaggtacagagctgtgcaccctttcttgctcttcgtctcgatggcgtcgtctccgaactggaacaaatagggcagcaggtccttgacaatgtaggcgtggccatgcaccgccgcgtacatgagcggcgtcaagcctttgacgctgtcacgcgccatgagatccgccccggcactcagcagctctcgaacgacctccagtcgtccatgtccagctgcgaagtggagagcagagtacccagacttgcagaacttctcgagactcgcccctcgagcgaccagaagctccaccagcgccaattggccgttcctcgaggcgaacatgagcggcgtcatcccgtcagcatccaccgtatccaccctcgcaccggcactaagcagcagccgagtgactgccagttgaccacactgcactgcaacactgagagcagtctccccttttgtgttctgcacttcaagagctgcacgtcgacccactaaagcctgcacaatgtctgcatggccctgtcttgtggcgagtatcaacgacgtgcatgagctcccgtctgtgcggttgactgcggccccagcgttcagtagcagctcgcagatctccagtcgaccgaaggtcgcaaccacgtgcagtgcagaactcccgtccttatccatggcgtcgacgccgacgcctcgatccagaagacagcgcacgttgctggtgtgacccctctttgctgccagaaccaaggcggaagcgtacgttttggcgtccctggcgtcgactgcagccagcccctcctccttcagcactcggagcacgtccaactgcgttcgagccacggcaagttgctgcggagagcggcagcttttggcgctgaggccgcagctcagcttggtgtacttcagcgtcatgttcatggatagcggcgtccagccgtctccgactacggcctgtcgagttccgaccatgaagcgaacgggtgtagttagcggccacaaggcggtggattgagttgtgaacgaggtggagctggtggtggagtgaacacttcgacatgcgctgggttccagtatcgtggggtcgcggagacggatgacgcgtgaaatccctccatcgaaggaaggagctccaaggacaacagtccagagcaatcggttgttgactgggaagctccgcttggaacttgggcatgtgtgagggtggtgtggggtgctgaacgtgctccggcctcaacggtcgaaatcgtcgcgttagtgacgggaagtcgcgtgtgtgatctgcattgaggccgtcaaaaggcttcctgatggtgatcggccttgaatgcaattgtgtgcaatgcttcgagaggcatcgcacgacagcttcgaaagtcggatacatgtagagatggatgtgcccacctcgggtaagcatcggcagctgggggcactctaggtgtgcaactaccgagcgatacttcaccaaaggtgtggatgacatacaactaagcttataacaagcgcttagcgatctcgtcttcaagtcttgaggtcactgagcgctcgttatttcagttgtagcgaccgtgtagcaaaccctgcgcggtgatagtggagcgaagagcgtcatcgaaagtcctgccgtctttacagcggttgcattttgctgctcctccccaacaactcaaggtaatcctggtccatgtgtgacactcacgtcctgcttgatgctgcagtcgaagctgtgacggtgcctttagtacggcgcacaaagagcaagacgccccctgacggttgacgagcgatggttttggtgaagcgccacgacagccgacaaaatgaacgcggttgacagtgaactggcgaaaagtgtgaagacgtgggcttgggataggatgatgaaggttcaattcaaagcatgggcgacgacggaagtggcctctgtacaggtttgatgcacatcctagactcaaaaagcacaacgactgcatccggtggcgcagctaggaagagtattggatccactcacctaagcttaaaacgcgatagcccacagtgttcgtcaagcagtgcctatgagcacgatgcttgaagcgacagcgggcagcttgtagtcaagtgtatccatacacgtctccataacgtcggtcgaatataatggtgccttcagctcgctccagcatgcgctgatagtatggagagaaaaggcattcgattcggaacgcgtgacgcacaaactgtagaagagatgcagttgggtccgaggccacgacgaatgtcgaggtagtattccgatgcgtccaggccaaccaagcgagtcatgctcaacaggacaaaaatcacgttgccgctaggatataaccagatacattgagcaacgagcgcatcgcccttctccgtatgaacccctggatcggtagctgtactctctggtgccgtaagtcttgtcgtataagtaaagagtataagtaccagtagataaacgagagatacttaatgcaggagtgcaccagaacaggagatacgggagtggatcaccgtgaaaacatccccgcgagggttcaaaatcaatgtcactgcccgccgacacgacctaccaggtccagcaaaatcgagaagcagcacatacctagaaacaccgcgctcgtcgtaccaactcacaagatcctaacacatgatgacgaagagagccactccccgacgtccaatagtttttgatgaagggggcgctcgataacactgcagacctttgcaggagcttggcttctcgacaaaagtttctgtatcaaagagatacttagcacccaacacagcgcgagctccccaagatcggtacaaaccctaccatatccaccgtccttccaggtaacgcaggtcgcatgaataagggtcctccatgcttgtcggtgttggacgggatggcgagatgcggtgaaggaatgggaaacgatgccacgctgaacgaactgttctacctacccgttgcctgtgcgattggggagtggcagcaacgaacagacacggcggtcgcaaattagcacaacaaccttatgctaacagcgttacctatttacagccaccaccacctcgtccaaccaccatgaactgatcgactaggctccacccaccacttcttgcagtcacactggggtcgggcacctctctctgagactcggcctcgcattttcgtcagctgcaccacagatccacccaaccttcgagcgcgcacccgttcactgatcatttttattgaagtttcaagtaggtacagtaaccctcccagttggtcgtatcacgaccaccgctgagactggactcaagcccttgtgtcgggaacgtgcggcgcccgtcgtgcgctacaacttaccagtcactgcccgtacagcccacgatgtagtcccgggcctaagctgtggttcatttactccatcaacacctgagtgcaagcacgaaaaaaaacgagggactgtggcatgagtaagtgcgtagacccaagatatctgagcaaacgactacatgcgatagattatatcgaggtcacgtcttcattacatctacacccacacagcgagtcatgccaggactactccttttcccttgcgggctgctgcttgtgccactccacgccgaagaatgacgacacgtcgaagctcaagtctcgagggtccagtccgtccaagcggctcaggatgttccggtagcacagcgccttgcgcgccagctgtgcgttcttggagggggagctggcgtcgtccagtgcggcgaccaggagccgctgagcattcgtgcagaagcggtggcgcacgccttcgtcgctgtagtgcagtcgcagtcgaggacgctcctccgagatctggttggtaccgtatcgtgttgagagtcggacgcctgctcgtccaagttgagcagccactgcaggtagtcgatgtcgtcgtcttcttcctctgggatccgcgcagacgtagcacgtcggcgccgtggaggaagacattgtctacacgagctgctgtgcttttgggagatgtgtgcgctaaccgaagagtctggaagtgatccccccggcgggcattgggtgtggccgagttttggtttagacgacacagacagagagagcaaaaaatctttgcaatacagatgcccgacccctttcgtcgtgatactacaccatttccgggtcgttctgcacaaatgctcgattcaaaacgatcacgtagaaaaaagggcagtatacttatggcgtatacttggccgacttctgatcaaattctcgattcaaaatgaccacagccattttcaaaacgatcagctgccctttctgtgataccacagagggaagcagatcaacaattgtccttttcgagaaaattctggctgatctcagtattaatttgagaacataaatacgacgcagtgtcaattgttgatcagtctttcccacaacgtaccagaaaaatggcacatgttcatttagaaaatgaaagtgattgttttgaatccgtgtactgttctggtcggagtcggacgtgtatactgccctttgttctacgtgattgttttgaatcgagcatttgtgcagaacgacccggaaatggtgtagagccgtccgaatggatgtccatttgctcgcagtaccccgtgcaccggcgaatcgcgagctccgaggctggttggccgtttagcaggatctgtccgcggatgttgccaccagttttccgtcctgcgatcacgtccatgagcgtcgtcttgcccgctcctgaagaccccatcagcgccgtcatggtcctgagtaacgcgaagccactgatgcccttcagcaggtcagtagttgcgttgggctgggcggggtcaggcacggagtaccatacatctcggaaagctatcgccacaggcacaaacgatctctcaggggtttgtacgatggggatcgtcacgtccgccccctttggagtcgccaccaacgcataatcggccgtcgacgatgaagtttcgtcgcgaatggaggcatcattcaccgccaccgcaacatgttcggggctctcgtagcgccagtactccaagatcaaccaggagactaccatgaagagaaggtagacccccaccacgtagacaataccaagccacagccacacccgtcccgtctgaacatcgtacgaagtcaatgcgtagtcactcatcgtcatgccgtaggtctcgcagtagtccacgccgcgatacacgcacacagtaaacctcgcatccatgtactggttcattgctagtgtagctagttcccgaaccaccacgccaattccattgcacgtcggctggttcagcagccagagagagagtagtgcgtccacctaggtagcccggtggacgtagcgacagagatcaaagtgcgaggcagacacgtcaacactaccagacagctactggccgtcggaccagacgtccttcggataggaacggtggggaggacacattatcggcgaccgtcacccccggatagggtctttgggctgtgtcccgcaggtaatccgtatttctctatctacttcgagttcaggagctcaagcccgagtgcggcgagcgaactccttcgcccttacgatcatggcaggcttcgcacttcctgccacgacccctgtggtctctagccacagtccccaccaccctactgtgttacgccctcatcgtgcaccaatcgtcctaatctctgcctcaccttagctttactggaacccgcgtacggcgccactctcttgctgtatttagtcttaactgctcaccaaccgggaacaatcttaactgaaggtcgagcggccagccgcgcgctcgttgcccccacctacgaggcctcctattctctacctacgagagggcccttcctaacctatctgctctcgctgtctctcagccgcacgccactcgctctgtcgtcgcctctcctctctgcatactacttgtccttcactcttctccgtgtccgccctcctgcgatcttttgcatggccgacatctggccttgaagttgtaggataccgcccgtagccggtgtctccagcccactggctcacctccgccaccatccaactgccgctgccacacttcgcgccccgactggctgatcgtcctcttcgtcactcgttcgtcaagtcgatgacgactcgagtgcgcggctgtcgccgtctgtcggccacgtgacaggccgcactactacactgggcgccttccaaaacctatataaaacggtttggtcattaggggtaggggggataaaaccggtcattaaacggagcgattaaacggaattgtttggaggataaaaaaagtctccgttcaaacaattcgaaaatgagtttggtcgtccttttaatcacccccctatttggcaactcgattaaaaaatatcttaaagaatgtatgggtccaaacagctccctcatttagagatttcgtttgaattgaagttgcgcgcgatcttagagggctttaaggcgcgaaagcgcgcgcgctcgcacagcccacgcctcatttcgaatctcacctcgtcgtgccgaagcccccgcctgctgcaaacgtgtacgtacactgtatgagttgctgtggttgtgcataccagctagaagattgttgattcactgcctaggcaaccatgcacccgtctcccccgagcaaacgccgccacgcgacaagctgtgctcacgagactttgagtgctctcgtctccaagcgccgcaagctcagcgccgtggcgtttgacgccgctgcaatcgagtcaaaccgctgcgaaccgccatcagcagagccacgcagcgaggtcgctgctgatgtaccagtcaacccacttccttcggccatcttgctgtcacgcccacgggaccaccggcgggactttgcgccggcgcgaaggtcaagaagaccacggtgctgacggtcgtcaagaccgtgacgaccgtgaagactactgtcacgacccgagtgtcgccacgcgcgacgccctccgccgaggaggaactgtccagagagatctccgagcactcggcctcgttgccctccggcgtaggagcccccgctgcttctgaccaccaacggtcggcgtcgccaaggacgcgatccggtcgggtggtgctgcccgaaggcgtcaatgcgtctgtgacgatgcaggtggctccacttccggagtttcggctctccccgcctgcctcgtcgggtgatggccccttcaagcctcgttccagccagagcactgagacggaaccatcgcccccggtcacacctgcgcgctcagctccgagtccagatgctgcatactcgcctgcgacggcaagttcccaaacaagaaccgcgactcccccgtcgccaccccaaagccccttccggtcgcgcctgcacaaacgtgcagaggttcttcctgcttggtataccgaggcggtcgcctccgacagcgacgaacccgagacggcgcggctcatcggctccccacttccagctgcacgcccgtcgttcaccgcctcgtgcatgagctccccgggctttactgttgtcgaaggcggtgccgtgaacccaccccgcgacgagtggcagctcgagacgtggccggatgacgtgcagttcacgtcagcgcagctgaatccgcgccgctggaagttcccagccgtcagtgtgggggtgagaggggggcttggctgtgggtgcgaggagcgctgcaaggcaagcacttgcctcaacgctcgaagcagcagattctgcacggagtacaactgcaccttcgctgccgagtgcggcaacgggcttcacaaaagccgcgcactcgcaattggtcgcaacctgcgcaccggaatgcgcggcttggtggcgcaagctgcgattcctgctggaggagtcatcggacagtattttggccacatggacttgttcgggccgccctgcaagaacggcccagtcaacgacggctacagaatgcacctacggacccgcactacgggcaacaagttcatcggcatcgacgccttgaaagtgggcggcaacctccgcttcatgaaccacacctgcaatccaagcgcccggttccacgaagttcaaacgggccagcgcctgacggtggtcgccgtcagcattcgtgatatctacccgggcgaggaggtgacggtctcctacggcaacaagttgtggtttgtctgtcgctgcgggtggtcggggtgccagcatcgccacctgcaacacttgcaccaggactcggactctgcttgaatccacctcccgggagcggctttaaggcagctttgcattgaaaattgtgtacatgttgtgtaatgaaatcttttgaaattcgtcgtatcttacgtgtctatctacagcgaggccggcagcaaggataccagaactacggtgctaacgaggagcttctcctttgcgacctggccgcaaaaatccttccgactggaaggaacatgtggatggcgctagcggccgagtacaatggctccagggacctacctggtgggaacgcgactttgactcactgcggagaaagtttcgcaagctctacgggaaggccaagcccacgggcaatcagggtgaccgcctgacgctcaaacagcgagctatcctcatggctcatgcgactcaatatgagatagagaagaagggagggacgcacacctcgcacgacgggcgcgacaacggagaggacgacgagaacctcatggatgaggtcaacatggccctcttcgcggacgaggtgggcaagaccttcaacgtgaaaccgaactcggtctcgaccaaggacggtggagacagcaaccgtgctcggatcgacaagcagcaggaggatgacgaggaggaggtggcggaggaggacgacgagtcggtctcctctgtcaactcggtcgacgacgaaaaaagctcggaggagggtacgtccgaagaggctgacgccaaccagcctcgtgacccccctcttcctcccgttgccgagcttcacggcagcgatacgcggcttgctggggtcgtgatgacccagcagggcctcgttccggtcgagttcgctgctgacttccagcaggctgagtccaaatttggcgacggagaggtgcgtgatgcgcaagacggccaaactacagctaatggtgcacggagcgatcgaagtgcggcctctgcaacgaccattgacgctcgatcaacgtcaaatgcgttggcgaggcccacgccggtgacaccgagagctgtgggccgcccgaagcgcgactgccaacctctggcttcggtggcttcgcccaacgggcccaccctaacgcgaaacccggatcgtgctgcttccgatgcagcagaggccgaaaaacacaaacggctgcacaacaccagtgattgcctaggtgggcgagatctacgagttcttcgggacaactttgaggtgatgggtgggcgcgatccaggagctaaagccaaaagccccgcgtctgagagctcggtgacgacgacgtacgctgcgtcgaagagaaaccaagccaagaaccgcatggattctattgacaaagaattgaaagaagcagaggctgcccacgctgcaatgggatcggaaatgaaggagctactgctcttctttcgcgaagacgccgatcgcagagccgaagccgaggggaagcggcgacgagaggaacgcgacgagcggcgcgcagaggataaacgagagcgagatgagcgagagcggaaaaccggttgcaaagcacaatatcatggagcacatatatatcatagagcacactttcgattatccaatgaaagccatataattcacacttgaaataagacattcaatctcggagcctgatagccgcgctcgttgcgttacgccattttgaatggcgcgaacaggtagaacacgcttaaaaagtgaaggtgacgcgcggccaaagcactacgagcgctcgttgcgattacttaagtacgtacgagttcaagctgtgtgtgcttcgattcctagacactacaccgatggcaaaaacggtagctaacggacaacgccaatttgtataccgcatactattgaattgaacacttgtcaaatctagaaagatatacaaataggaagggggttatactaccaaagtagctccgacgcattcaagtctgaaatattgtgtgtagagctagctacgttctgcaaaacctctttgatggcatcctgccaacgtatgtaccagtcttcaaaccatggagacatccatagattgcgcagagttggttcacaacgtctctcatgccgttagatgcaagcagaacttagaccaacaaccaaaaccatttttctttgggtaccttacggtaattttgcgtaaagttacacaaaatgcaaacagtaccgaatacaagtgtcagtttttaaactgtggtctttaaaaagataaaaaaataaccggatcttgcttgccgtatttgacaaagtaatacttatacggaaaataaagggtgattttcaattttaagacatctcttagccaatcaaaagatgtttacatgctaaacttcacataaatttcaagaaaattataagcactcaacgttctatacggtttggttgaggtatacaaattggcgtaggtacaatagctttgtatactgagcacattctatcagatttgagaggcggtattcaattcgggaagggtacgctatttggcgctatccgttaagtattttcctgacgggaaggtgattcccttcatttcattttcatccgggcttcaggaacaaactttgccaggaggtctttcaccgtcttggccgcgatagtttccgccagatcgaaggtcactccaggaatctcgtacacgtccatgatcttcgtgaatattaaccctatcgttaacgccatacatttctgtttgaagggacaccatacaaactttaagtaaaacggggtaaaatgatgcatgaggtatcattttgctgtattaggtttgcgaggccaactgatcaaaagtatacgtgatgggaggtttgaagcgacctttcgatcaaaaagatacgtgaggcatcattttactgcttctctgggattcgctgcgaatcgacaaaagtatcagtggaagcagtaccgtgagaacagcaccctaacaaaactttagtaagagcagtaccgtggatcacagcgccatcttgtggattatgtggggcttttcctagttgtgaagcggtggcgccgtggtctccgatgcgacgttggcgaatatggcggctgtcctggacctggccggagcgtctccgacggcggcgacaagcacgcgatgactgcgggcatctcgggcagcgggcgaaatggctacgggagcgccgtcagcaccgtcaacagcatggtctcggaggcttccgcggcgaccgtggccgtgttggacgtgatcgggggcgtctccgctggcatggtcacgaacgcgacggtggcattcggctcgggcagcgagcgcaacgacagcggcagtccgcacgcaggttgccgccggtagtagcgtcagcggcgtcgccagcgacatcgacagcaggttttcaggcgcgatggaggtgactctgaccttgggggatgcggtcagagctacgatgtccgtgcaagacgttgatgtagatgtgtacaatggctgatatatgttattggctctacaggtaaagaacaatgggatgaacatgtctgacaaacgaagtaaattgaatgtccctttccattctgcgcgaggtactgagatgtagggctctacaaccctggtgtaccagtatgcgtgatgaagctgggaagaccaagacacgtgaacgtcgatacgctgcggagcgtccagacagagcagaagttgcgcgggcaggttgggcggtgcccgccgcaaattgttgccatgacaacgacgtggaccaaacctgctgctgaagatgcaaagtcctccagcgccgcaaaaattgtaggctcgaaaacgatattgttcgcaaataaaacactgcacccgtcaatatcctcgcgtacggctgggctcatcgctctgaggtcggcctcgtgaatcgtgaccttggataaattcgggaaatccacgcgtgcgccacgaatcagcagtttggacatgtttgccaagttgtcctggaactcaatcccgatgcatctcccaacacaagtctccaatgccacttgtgcaaccacgttgccgatcccagatccaaagtcaacaaaagcgtcggcgattgtaagcgttggaatgactgccagtattgctgaaaccccagttggcgaaatctcaccagcatgacaatccggcgcatggacgggttgacgcaaggccgaggcatacaaacttgacacagcgtcatgaacgttgccaatattatcgggagcgctcaccttgtggccaccactaagcgcgtccgtgccgatttttgatcccgaaatctccttgggaaagaatctaagctcacgccgtgtgtcctcttcagcgtctttagacgaatctgcagctgtcgctgtgtcttcccgcagtatggcatccccaaccagacagtccgccagttaattcggcggcctgcatcaacctgctcctttgccagccgataaagcagcaagtcctcttcgtccgagaagtctgccatcgggttgccacgagatctagaaatctataatgccatacataccataagatatttggtctcatacttcttcgcctgataacctaccgacctttcacaaaggtcccatccccatcaatgtactcaacaccaggttcaagacgctcctaccgccagcaaggcaactaagcccggctatcgatgccgctgctataaacgctctcgtggcgctgcccagccaacacgaaagcacccctattagcctcatcgaccgcgccgaatgccaccgtcacgttcgtgaccatgccagcggagacgcccccgatcacatccaacacggccacggtcgccgcggaagcctccgagaccatgctgttgacggcacacacggcggcgctgcggccgccgttgtgcttgctgcccgagtcgcccgccaccatcgcatccgtgtcgccgacggcggagacgctccgaccaggtccatcaagaccatgattgggggaatgccgatggtagggcgtttcggcgagggagaacgggtagagcggtcgcgatacataatgtcacataaataggctattggtatttgaagtggtttacacaacatgtaaaggctcgcctttttggtgcccattttgctttggttcatcttttcgagctttcccgcgctgacattttttcccatgtcttcgctttgaccaatcaaagcctgtcttcgaaaattcgatgacagtgattggctgccaaagttcaacaagaagtgtgattggcggaattagttcaaatcgatccactgttgtttggtcggcttgctccgaatcaaaatgaccttctcgcatcggagctcatttccgattttgcaagctcgatcccaagtgtccctggctgaccacgctccgttcttccggtttccacgcctcggacgacggtggtacacatatgctggccgtacccatcgtttacggcgcgtggctgcccgtgatactgtgcacgctgcggtcaagtccagcctgccagttcgcccctcactctccaagtccagcgtcgttggagtcgccacacgctcagctcctgtgtgtcgacgcatctgctgctgctgaccgcctgtgctacttgacgcgctgacctcgggacgcaccgggcatgaagttggactcgctgtccgtcgtgtacccacccgacgaccacgtcccgcacaaccgccgcaacagcgcatttgttgtcgataacgcagtgctactagaactggcgctgggatggtgtcgtttgtcccgtagtccccaactctcctcacggcattgccgccgggtgtggctgtcaaccacgttcagctgcgagacgccgagattccgctacaggaccccgagatggagcgtcggaggcggcactggacgactgcccactagacctgcaggtggacggcgttctcccgcccttttcgcttccagcgatcctcatcgacggacaaccgcacgtagatgcctcaggagggagcggggtgccaccggcgacaaagatcaagagaggctaccgctagaaatggagcgttcgagtcccatcgggggtcaagatggagcctgaagtcgccatgacgacgacgtcgcaagcgcccaatttgcccagcgacagggacacgcaggcggcattggcacttggcagcagtgtatctacgatgggcgtcaccactgtcgccgtgtaccgtagttcggaccgtcactatggggcttgcatgggtcaacgtaactctggagacgatgccgaagccgctacagcacttatatttggtagcaatactggagtaaatctaagtaccgtatgttaccgttgaacgctttgagtactcgtactattcatgactctgtgtaattacactgtattcatcccgcactcgatatccgatgcattttgcacggtaccttgtcagcacagctacgctgcattccgcatggcgggcattgaacctgcaccggtgggttcaaactccaccatactaacatcacatacaacgatgagtcgaaccaccccatacaaagcctagtacgttcggtccctttgaacacttcgaacatggccatacaaataacaatatattcggtccaatggctcaagcgagaccgatgcatgcaaaccagttagagatctttgccgtgaaggagccactggtacgctagctgagctcgtccaccaccacatacccaatgccacgaaagcggaagcagcggtcgagcacctgcgagcccacagctaagcgacaacaatcacgacgctcgggtcgtatctcaccttcagctcccaccggtctaggtacgatccgttgcttacctagcgctcgagcaaggtatcatattgacgcgtgtccaccggcatacagacctcgcggatgaccatgcgatgcttggatctgtttggcgagttctaagtgcggctggttggaattcaaagcgtccaacagggcgaagcttgagtgatctgtaccgctatatccctcccggtgatgactcgaatggaacagagggtatcgactattttctgggtgaacgagcgcttttggagcactatcggcggacattggtagtggaggatggtgatacggatggtgccctgtccaagcgacccgatgacgaaattgatgtcgaccaaaacaacgttaatatatgtggggctggcgatgttggtctcaacgcggcagatgatgtacgtggtagtagcggcggagttcctggagcgagtgcaaacgacgttgattgtgagaaagccgcgcttccgggagtaaattggtgtttgatggtgctgccagcacctctcaggattatgatggtgctgcctctgctgtatctacaccgccaacatcagcgcgcgtcgtacccgtatatgcagcagctacgcgagaccatttactccagctagatcaccacgcacccaccgcatcgtctggtacatgtgcgcaatgtgcagtctgcaatatggagtgttcaaccgagcgcagttgtacctggtgcaaaaaatttctccatcacttctgctctcatgatgtctgcgtttcgttgaatatcccagaccctaatggtggattcgccaaggatttcggtggtagcagctattgcagcacacaaacgctacaaaaatgaacttggtggaccaagggagaagtgatgaacgacccaatgccctacttgacctccccgcgagtgttttgacgccaagtgtggctccgtcggaacctgcagagaccaacgccgccacacatcctgctacaaattgctcgggggcagcaaaacctaagcgaaaaaagcgcggtcctgccgaacaatcagctccaaaggcacctcgaagcgaaaaccaagctgcgcaacggaaaacgaaaagcaagaaggcacctaccaaggccagtaaacccaaggctgtggcaatgaaagaagagttgattcgccgagcacatgcggctgccgaaaaatttgttgatgctagcgtagcattttcaccggctgatgaggagtggatgccgctcagtttgtaacgcgacgttggcgcagcatttttgattagtgtggtgactcgctacagcctggcaagcgaaaaaaatgctgacaatgttagcgttcctcacgacaaatttcaggttcaatggacgtgtactgcttttcaaataaaagatcacgttcaccacgtttccgaagccatcatcacccgtggtatccgccagtttgccaacatggaaaaagacaaacttcaatttggagagtcttggacgtccctgtgcaacatggtccccaaactatcaaacattcctgcactgacagatgaatttgaggagatggacgagcgtggttatcgtgagtggtttgcgtttcgcgggcggaaagaattgcagcgccctttgtgccctggtgaagtcgaagagatagcgtcaatgacattttcacccacagcatcgcttggccaaccgtcagggctatttacacatccggatgggtcttcaactaccagactacgcccgaaaagtcatgggttgtttgggcattccgcaacctcatcgttcttcgcgtttattccgttgtcgttctggatccaagtggtcgtctttaccaacgagtatgcagacgcatctggcagcccatcggcaactcctgtaagtttagaggaactgatgaaattccttgggatcctctggtacatgactctgttcgacaagggtgagatgagaaattactgggtggacgacgaggaagcaactattttttcctggagcgcgtactactagtttgaagtcaattatgacatggcgaagattcctgtacatccgtaagaatttgagttttcgttccaaggtgtctacctccgacatcaagcgcggtcctgtagctagaatacgaccactcatgagcattctgaaatcgcgatgcctgcgccatgttgaagtcggtcgaaacgtggctgttgatgaggccacaattgcctgccgatcccagtacgcccgccacattatagtcttcaacccacaaaaacccaccggaaagcatcatttcaagttatacgtgtgttgctgttctacctcgtggtacgcggtgagtttcaagttgcactgctccagtgaacttgatgatcggctggacggtgtaatttcacgctcagaagtgcagaaattcgctgatctaaccgcgaagtcgtctgaaatccgctctcacgtcatggggggatccnnnnnnnnnnnnnnnnnnnnnnnnnnnnnnnnnnnnnnnnnnnnnnnnnnnnnnnnnnnnnnnnnnnnnnnnnnnnnnnnnnnnnnnnnnnnnnnnnnnntctgttcgacaagggtgagatgagaaattactaggtggacgacgaggaagcaactattttttcctggagcgcgtactactagtttgaagtcaattatgacatggcgaagattcctgtacatccgtaagaatttgagttttcgttccaaggtgtctacctccgacatcaagcgcggtcctgtagctagaatacgaccactcatgagcattctgaaatcgcgatgcctacgccatgttgaagtcggtcgaaacgtggctgttgatgaggccacaattgcctgccgatcccagtatgcccgccacattatagtcttcaacccacaaaaacccaccggaaagtatcatttcaagttatacgagtgttgctgttctacctcgtggtacgcggtgagtttcaagttgcactgctccagtgaacttgatgatcggctggacggtgtaatttcacgctcagaagtgcagaaattcgctgatctaaccgcgaagtcgtctgaaatccgctctcacgtcatggcggttacttcatctttgaaaggatccagtcgcattgtaaacagggacttcctgtttgctgttgaagactttacgatcgattggtctctatgggcgtggcactgtacgcacgtctagcaagcatttccctcattttacgatgattcgtaaggaggacgcgaagccgcgaggctacatgaagcaaggtgtatgcttagagaagcatattgtcgcagctagttgggtggatggctcaattgtcaatgtcgtgtctaatgccgatgcttcgaccacatcaactgtgcatcgtcgtataaatgaatcgggtgtggctttcactgctcctacttgcgtcggcgagtataattcagcgatgcaaggtgttgatcggctcgaccaactgcgtgcacgattttctctagccgatggccactcatttcagaagtggcataaaaaactagcgatggtcatgcttgatatagccaggtgcaatgcctacatttgcgatagtttggcgcgtggtgagagcgaggagtctcgttcgacgggaggtacagcccaaacgaggtcaagagcccgcgatagtcatcgcgcatttgtggcatcactggctcgagaactattcaatggggactggaagaaatctctggatagggaacatggaatggtgtatgctgcgaagccgacaacgacaacaatgccgatgacgacccaaaccgcggcgtcgacagatgtatccgagtcttcgggtgatcacgcacaaacgtgtgttgcaagagcgtcctcggaggtgcttcagggaaggagtcgctcaatgcggaaatgcactgtgtgcaagttcgagggcagagatcctgccgagaaaaccgactactgcgagacccatcgagttgcgttgtgcaagcgcacataccctgttgaccctacgaagcagcatctgtgccaacagcaaacttggacttgctggcagaaataccatttgttttacttgccgaagcaagtgtacactgtcgacggcaacttgcgacgaacctctccaatttatgtagctaaccgtccatttctgaaggcccgccaagaccaaaagaaggctaacgcagccaccaaggcgtaacctcacatcattttttcaagatagtcaaagtcaactaaccatttatacttcactgcactaagtcacacctattccatctgcccccgctagtcttgatgccgtaaatgcggatttagctcgtggctgacaacatactgctttaccactggtgcaccatagcggcaagctaaccacactccactgcgtataatccgacaggatgctattagaaattccacgcgcctccaagccgaacaataactcccaactgtgtatatgtcagcgaagacgcctcagaccacatccagcacggccacgttcgccaccaccacatctgaggtcatgctgctgacggcactgccacggccgctgccctcgctgcccgagtcgcccgctaccattgcgtccgactccatgctgacgaagttgcctccgatctcctcccctacggacacgatctctacaaaggacgtcatgctgttgatgccgctgacggtactgctggcacctctacaacggtctccttccgcactgtcgatgcatttacgcacgctgtctggtcaccggtcacatccttgccaacctccgtgccggtggaggcacccacgaccacctccagcacgacaacggtcacgcccaagcgtccgtggtcatgatgttgccggcgcacacacggcgctgcgaccgccgttatgcttgctgcccgagtcccccgccaccatcgcgtccgtgtccgtgtccatgtcggcggagacgcccctgaccgcgtcctccaaggccacggtcacctccatcgtgtccgagaccctgctgccgatgtcgctggcggcactgctgccgctacttccggcggcgacctgtgtgcggctgccgctggcgttgtgctcgacgatcgcatccgtgcccctggggacacaatagtgttgatagatatactacagaagacacaatagcgtggggtttttacctatccctcttagctgtatgattggtcataaacggcgaggaaactgccgtggctcagaaaattgctgtttcagttatcttgctactacatcaccagtaaaaagatacttgatgtatcattctggtaacgatagggttaagctatctatcgtttttttgggagccccggaggttgctggggtcgacaaattgtttcagataattcatcataggaagatttctcttcgccaatggctgatcgtcgccattcttcgtcttccgaagctcctcgctcaactgagtgaatacgctctcgtcgacgaacgcagccaaagtgtcggagtccaactcgctggatatgtccacctgcaaagcagcacagcagtacacagtcagcaaagtggcagtagtatcatggcggcggtggcgagaatgggggcatgcctgctaccagacgcccaggcattgaaataaaatagaacgcctactaggcggtctatccgaatacaacgcctaggcgttctaatagtgtgaaaaactaaaactctgaggccctggtgtccataacgtatatatcgccgcgatactctactttcacatcgttcgtattgcgtcaaaaatgcagtaggaaaacgtcgagaaatcctgcagttgtcgagtactacaagcagcgcgcgacgcccggcggcctcatcatcgccgaggccaccaacatcacgcccacgggccgcggatcctggggctcccctgacatcttcgcgccccagcagatcgaggcttggcgccacgtgaccaaggccgtgcacggcaagatgttcctgcagttgtcggactaccgcacggccgcggagaacgccctcaaagcgggcttcgacggcgtcgagctgcacgccgccaacggctacttgctggagcagttcctgcacgacggcatcaacgaccgcgccgaccagtacggcggcagcgtcgagaaccgcgcgcgcttcctgttcgaggcactggaggccatcctcgagagtctggactcgtccaaggtgggcatccgactgtccccgttcggcggcagcttcggcgacaaggactcggaccccgtcgccacctacacgtacgtgctgaacaggctcaacaactacgacctggcctacgcgcacctgatcgagccgcgtggctaccacgtccgcaacccgctggcacccgagaaggctcggcgcggcagttccgcgagacgtacaagggcgtactcctcgccgcgtcgggcttcgaccggcagtcggccgtgcagatcgtggaggagggcgcggccgacgccgtggccatcggccgccacttcatctcgaacccggacctggtgcggcgcttccaactcaacaagcccgtgaacgactacgacacggacacgttctacctcggcgacgcgcgcgggtacacggactataatacccgttcctgcaggacgagtaggtagagcagtaaagacgacgtagacagcaaaagacgtgccacttccgtaagactgcaaggtgaagcgtactggaggtggctgcgtactctcaagtaaaacaaattgttggtagttaaaactaccggtagttgctgcaggcaccaggcacgtactgttactgcctcggtgtgggcttgggcgtcttgttggatcacttggcgcgtttagtgggacggccttcttcaccctcttggttttcacgtgctcgtttcttggatgtttccgtctcgccaccttgatcgcctagtggccctcaccactgccaccaacgtcactctcatcgtcactcttcttccttgtcacccggcgcgtacgctagtgctttacgggcgttctgcaacaacttgtcgcgcgtcgcggtaagcgacaactttgcatacgaactaacgttcttgtttcgtttttcatcttcatcgcgatagtccaggtcgccctccacaagccccagcgggtcatactgagactccaccatgtttgatagaatggaagccacgccgtcgctcaggaacgggtaggtgaccctgttgagtaaacggaggcagatcgtgaaaacaggctcctcctctgagacactcgacacacttgagacgccaggattgctctcgatcttcgcccgcttcttcgcctgactcccgatcgtctgactctcctccttcacctcagagacgttgcctttcttcttgggcttaagattgtctttcattgtcgtggcatagatgaacttgccgtcactcttccgaccgcgcacattcatgtagatgcgaatggtatcacggacatccgtggagctcagcgggttcggatccccaccaatttcaccggtagatttccccgctgacgagttcccatcactgttctttccgaacacaaaccaggggcatagtttctccgtcgctgccctggaaaacccaccatcgactggggaacgattcttcacttgaatcaacatcatcaacacttcctgctcctcttgttcacccctcgttgtctccccaccgactggcctgctgttggatctcttcttaaacatcgggatcaacaaatcggctccatactggttacgggggaaaatacctgcagcttgacgccccagcaaaaaccaaagcgtgtcctcattcggctcaagctgcaactgcacaaagtgggtgaaccccatgtaccaaccatcccacttcgagcaccacttgttgaattctggtctcaaattctccttgctgatcatccgcttgagatatatcggcagctttttcttgccttgtagcaccttcaagaattgctgcaccggtacaaattgcccgatcgtgtggcaccactgggaaaagtctttgtcccccatcacacacgtgtccatcgccagaagcagcaaaatccgagcaaccatctcgccaatttcgccaactccaccggtgtccaatgcttcatccaaaaggaggttcttgagttgcggcaggatatactttgccaaaccatgtttcagttcataccacactttcatcgctcctaaggcgagcactgggtccgaagcgtagctggtgacgtaaccttctcgcttgaaattcacataggcgagaatcgccatgaagtcggcagtcgcccgagatgccagagccgacgttgaatgcgggcgcacgcccagacggcaaagcatggaggcgacaccaagcatggtatccttgttgtacgcattttgcgaagggggaatccccagtagcagcttgttcgccgcaagattgatcacatcttctctatccgcaggattggggcaagtgctgtaccacatcggacgccccatgcggcacaacgcgtgccaagcttgactcgcatccccggtaacgattctcttgtacatagctatcttagcacgttcttgctgtttcttcttctcttcgtctttttcagctcccaccgcaacctgagtttcctcttccatttcttcatcttctgctcccgcatctagtatttcctctttcatttcttcatctacatcttggatgtcctctttcacatcttcgccggcttgtttttcttcacagtattgatcccagtgtgcgtccattgtctcagctaacacaactggcgcaaacgatgccaactctccatcgaaaagccgagatgatgggtccaacaacagcggaggcgccaggtccgagatcctggagttcgtatcaatcagcacgccgaaaatgcatccacgatggccgatatctttgttcacggatctgagagcatttcgcaacattcggaagtcattcttcttgtctggcttctcagtcagcaggcttctcgcttcatcgatcaccagaaccacgattctgccatttggattcttctcggtggaggtatccccctccagcgtatctgtttcatccgaaagtttcgcctttacagaggtgtccgctgccttttcggtaaacagcttcagccattccttctgaacgtccgcccaatgcttgttcgcgtagacgtaaattgtcttcaatcgactggcgatgtcttccacttcggagccttcttgaaacagccaaccacgaagctcgctcgtagccttgggaaaccccgtcgactcgtgcacacgagcacacatgtacaggactttcatgttcaaggcgctcttttgagcctcaatcgcgagttcacgcaccatccgactcttgccgaagccagaactctgcacgaccgccacacatggcgccttgtactttgtgggggtgtaggccttccagcagtcccgcagatactgtgcgaggtcgaggtgggcttcgccgaggtaccggcccttggtgaacgcctccgcgattcgcttcatttcattttcatccaacttgggcgtgccggagcgggcttcagggacaaactttgccaggaggtctttcaccgtcttggccgcaatagtttgtgcaagaggtggagacacgcgtgtatgcccgtatgcttctctgatctccacccatatcaatccatgtatccggttctgggaggcctcgagttggagtgtggctttgttgggatagtcgaccagcatccacgcaacgaaaagatttttcttcggcgatgcgtctgctccaagcttcccgctcatctgagcaaagacactgtcgtccacgaacgcggccaaagcctggggatccaactggctggacatgtccatctgcagcagcacagcagtacacagtcagcaatgcggcagtagtatcatgacgacgttggcaagggcgcgggcatgcctgctagtcccggtgggcggtggcgctacaggacaaggcttggaggggaaatgtggaaatggccggttggatttttcttccctcagttttgtaccagaaacacggtaccgcatctacgtgatatacagtgcgcgccgaaattataaccgcaccccaaaaattatttttttaaaccaatgattgtgctttcggcgccaaaccgctgcttatgattcgtctaaaatcgatagaaaacagatgcaacaatcagaatcgaaaaagctgtaaccgtttttttgcaatggacgaaaaaccgactttgggtcgggtcaaaattatagccgcacccggtaagctatcggtaagattggtaacaaactcgtggagagctgtttcaagcgtaataaatgaactaactccattgaacagctcgaataacgcctaccggtacagtaaagtgcgtcgataaggaacgcctgatatacattgaaagaaaaaggtatattgataattaaaggtttgactcgtcacatgcagacagcaaatgcactgatttactgcactatgtagttcatgtcggacttcgcgaccagagtctcggcttgagcccacgcagccaactcagcataggtagcacccggtagatcacgacggcgatgacagattagcagcgactgaagcttggtcagacgtagccgcctctcgaacggtctggaagtggcggtcaccatgggagttgtgagcagcagagcgaaagttggttaatgaggcatgcagacatgtacctggcgcgattcccgcgctcacagcgatcctcatgctcatgattccctctcgcgacctttaggttccattttcccccgacttgggagccgctccatccagccgctcttgaggctcggtttcggaactgtgattggcggaatgttaaacgggaccgaatgattggtagaatcatataactaattcagtacaattggcacacaatgggtacaagcgaggattcatgtcttgtcgtagaatataaaatgtcgcccgttccttatcgacgcacttcactgtagtaagctgctcaaataaggttaagctgacgcggttgataagattcaatggagacacgcactatcttgaatttgtatagaagagtagtgtggagaggtctatactcgtaagttgaggctgtcagctgactagtgtcttcattggcgtctattcaacatggtagcgatgctgggcttgctcagttcagcaacatgtaccagaaaactcgatcgatttttttccgggtcaatacaaatcctttatacttgatgtttgtattggaaagcaccgccaaacccagtcacaaatttcaatcaagtctagtcccgtacagtgcgtagtttggtaaatacatggctacgtatcaaaagtagagtatttcttcttgaaaataatgcccgagttttgcttccagaatcctcctannnnnnnnnnnnnnnnnnnnnnnnnnnnnnnnnnnnnnnnnnnnnnnnnnnnnnnnnnnnnnnnnnnnnnnnnnnnnnnnnnnnnnnnnnnnnnnnnnnnggagcgggcttcagggacaaactttgccaggaggtctttcaccgtcttggccgcaatagtttgtgcaagaggtcgagacacgcgtgtatgcccgtatgcgtctctgatcttcacccatatcaatccatgtatatcttgctgggaggcctcgagttggagtgtggctttgttgggatagtcttccagcatccacgcaacgaaaagatttttcttcggcgatgcgtctgctccaagcttcccgctcatctgagcaaagacactgtcgtccacgaacgcggccaaagcctggggatccaactggctggacatgtccatctgcagcagcacagcagtacacagtcagcaatgcggcagtagtatcatgacgacgttggcaagggcgcgggcatgcctgctagtcccggtgggcggtggcgctacttggaggggaaatgtggaaatggccggttggatttttcttccctcagttttgtaccagaaacacggtaccgcatctacgtgatatacagtgcgcgccgaaattataaccgcaccccaaaaattatttttttaaaccaatgattgtgctttcggcgccaaaccgctgcttatgattcgtctaaaatcgatagaaaatagatgcaacaatcagaatcgaaaaagctgtaaccgtttttttgcaatggacgaaaaaccgactttgggtcgggtcaaaattatagccgcacccggtaagctatcggtaagattggtggagagctgtttcaagcgtaataaatgaactaactccattgaacagctcgaataacgcctaccggtacagtaaagtgcgtcgataaggaacgcctgatatacattgaaagaaaaaggtatattgataattaaaggtttgactcgtcacatgcagacagcaaatgcactgatttactgcactatgtagttcatgtcggacttcgcgaccagagtctcggcttgagcccacgcagccaactcagcataggtagcacccggtagatcatgacggcgatgacagattagcagcgactgaagcttggtcagacgtagccgcctctggaacggtctggaagtggcggtcaccatgggagttgtgagcagcagagcgaaagttggttaatgaggcatgcagacatgtacctggcgcgattcccgcgctcacagcgatcctcatgctcatgattccctctcgcgacctttaggttccatttcccccgacttgggagccgctccatccagccgctcttgaggctcggtttcggaactgtgattggcggaatgttaaacgggaccgaatgattggtagaatcatataactaattcagtacaattggcacacaatgggtacaagcgaggattcatgtcttgtcgtagaatataaaatgtcgcccgttccttatcgacgcacttcactgtagtaagctgctcaaataaggttaagctgacgcggttgataagattcaatggagacacgcactatcttgaatttgtatagaagagtggtgtttgacagtgtggagaggtctatactcgtaagttgaggctgtcagctgactagtgtcttcattggcgtctattcaacatggtagcgatgctgggcttgctcagttcagcaacatgtaccagaaaactcgatcgattttttttccgggtcaatacaaatcctttatacttgatgtttgtattggaaagcaccgccaaacccagtcacaaatttcaatcaagtctagtcagtcccgtacagtgcgtagtttggtaaatacatggctacgtatcaaaagtagagtatttcttcctgaaaataatgcccgagttgcttccagaatcctcctagtgttgtctcggaagtccggccaaattgccaccaagtgtttagtgcactttatggtattaataaatgtgcgaacaataacttcggcgatgcggtacatactgttgcggattatactgatccccactatactacttgcagttagagtaagacaaaaggtgaaagagaagaatctaaacctcagttgagaatatacacacgaccaacaaggtggcttttgccgcccagctgagtgttgtcgttgcttccatctctgcgtgagcagcaccaagaggacactccacttcaggttatgagcccaaggctcacgcgaggggagcacagcaactaggacgtcatggtagagcagaagaagacgcccaaggagtcacacgaggagataaggacgatcccgccgtttgacggcaaggactacgaggtctggcacgagcgagtcaagctcatgctggagaggaagaagctgtggaagtactccatggaggacttgctcgagccggacgagagcaaggaggcagaggcgcacgcgacgtggacgagcgagatggcccacgccaacgagatcatctacgacgcaatgacgaatcacataatgaagactgtgaagtatgaacccaccccgtttcgtgtcatggagcgcctgaaaaagagatttatgggcaagacgtacctgaagtacgctgaggagagggccaagctcagtcggctacggctcgctcccaacggcaatgtgccagatcacctgagcgaaatgcgtcggctgatggagaccattgctggagtcgggcgtcctgcggacgagtatgtaaagccagcactattgattggatctctgccgcgcgaatatgatcatgttgtacagacgtttctcgccagccacaagccccaaaatgctgatgatcctcctaattacgaacaacttgaactcgcattggagatggcttacgaccatcgccaaggtcggaaagcagagggcgccaaggacaatgatgataaagaaaaggcgttctttgctggtggaggaagaggtcgaggacgtggtcgcggccgtggacgtggtcgcggccgtggacgtggtggtcgatctggaggacacgggcgcggttccggtagtggacgtggttctggcggtcgcgggagccaaggtggtggacgtggaactggacgtggccaagccggcagtggacaaaagccaggtggtgcttgttatcactgccatgaagcagggcatcatgtgtttgattgcccgtttcttggcaagcgacctccagtcgaggatcgcagcagcacccaagctcagaagcgcgtgaaaatgagtggaggaaagagtgctaaggctgctgaaacgagtagctacgctaatgaaagtgatgacagcgcgtatgttattcttcaagtgatgaaaatgaaaaagccggtcgcagacaaagcccatgataactggtacctggactctggtgcatcgagtcatatttcgaaccagctcactgatttcatggagttcacgcctcttagcgcccggattcgagttggaggaaagaactcgctgggtgttgagggtattggtactgtggttaaagagctggagactactggtgggaggtgcttactgacgctgcgaggagttcgttatgctccagagctgcagtgcagtctctattctgtgcgacggcaactgaaccaatatctgcctgaacgtgatcgtgtgaaggtgcactttgatgaggcagatcgcgctgatgttatcttacaggctggtgtgactaccgctcaagttgattataccaatctctatcgcttgaagttggagagaccccaagaggtagccatggtggcgctaccaggtcgagtgagtagtttggagctgtggcattcgagattggggcaccctggcagatacttgtttaatgcgctgttcagccatgatcagtggccgttgccacatgtgaatttgcgtatcccggtgggtttcaattgcgagacctgtgtgacggggaaacttacgaggaagagcatgaagaagtctcggacacagacccgcgagtggttagttggcgaaaaggtccatgtggacgcttggggtccgtatgcagagcactccaacggtggtaaacggtactttgccgtgttcgttgatgatgcgagtcggtttgtcaccgtgtatcttctggagcatcgttcggaagtgtaccagaagtttgaggagtacaattaacgcatcaagacgcagcagcatgtcagaatgtaagcgctaaggtcagacaatgcaaaggagttcaagaagctgcaaagtacgtgtgacacgaagtatggtatggagtttgacagcagcatcaagcatactccggagcaaaatggtgtcgcggagagaatggtccgcaccattacggagagaatgcgatgcatgctcgtgcacttcgacctgcctgaagcgatgtggggtgaggcagcgatgacaactgcatactccgtgaacattatgccaagctcggttcgaggtatggaggtatcgtatgcagtatggcaccgtcagactcctgcttatgagaagttgcggacgttcggctgcgccgtcctgtcgtacattaacaaggtggagagatggaagatgcaggcgaaagcacgggaggcggtcttcgttggatattcgcgagagaagcgaggctatcgcttgctcgatagcaagaccaacaaggccttctacagccatactgtcgtgttctatgagaataaagctggtcgattgctcatggactcggcatcaacaccaagtgcagcctccggtaaggaatatttaggcgttgatcgatcagtagaggatgacattgagccaatgctggatgaaatgcatgatgactcaaatgatggaggtagttatcgtgatgatggagattgctggactggtggggtcagcgactccagagacggaggtgattatcggactggtggggctgatgacacccgatgggatgaccgaccaggtggggcagttgagcaagatgttcggtcagatggggcatgtgggtccaagaagagaggccccggtggtgatgccgcagcgccttgaccaaagagagtgcggtttgcggtgtttgaaagtggacgttcttgcaaggtggcagaacgagatgaaggacgtggagtgagctctacagcatctggatgtgatcgttctagcaaggtggcagaacgtgatgaggaacgtgtcaatggacatgaggcagaccacctgcgaggtgagtgcgtgccaggcaattccaaaagaaggagaaagaggaaacgcagcagtgggcggcacaagggaccggctgctgacgaggcgagggctctaccagggagtcaagaggtggaagaggtggacagcaggtcatcggctgctgagcgggccgactcggacagccaagtgtcgagtgatgctgcgagtgtggggcgtctatcaacgcctccttgcacagcacttcgtgagtacacaggcccgagaggcactcgccctgaagaccctccagtgacacggagcggttgggtaagtaaaccgcccacgtggctcggtgactacgtctacattgcctacgaaaatacaaatccagatgatgatgtgaactcgttgcctgctggatggaggaaaggacgagctgcgtggcaacgtgctatcgcgaacgagttgatccttgcatggtgggaggactattgctgcatgagtactggcgagtttgaagagccagatactttcggtgacgctatggagagtgagcactcattgcaatggaaaaatgcagctgatgatgagtttgatttgttgatgaagaacgatacctgggagttggtcccgcgtgagaagcgcatgaaagtgctgcagaatcgctggatctttcgcgtcaagtatctagcgaacggagagatcgaaagattcaaagcgaggctcgtgatcaagggcttcatgcaaatttatgatatcgactacctagaggtgtactcgcctgttgtgaggctggagacactgcgtgttctcttgacactggcggctgtctggaattatgaagtgcatcagatggatgtcactactgctttcttgaatggggcgattgacgtggaggtctatatggagcagcctgaaggctacaaagtgaatggcaaagaggactgggtgtgcagattgaagaagagtctgcaaggcttgaagcaggcgcccagagtgtggtttcagctgctcaagtcgttcttggaggagcagggtttcacgatgctgcagtcggaggcctgcgcggctgtgaaagtaattgatgggcagttggtcttcatccctctctatgttgatgatctgattttgtttgctccgtcgatggagctcatcaacaagatgaagaagatgttcgagggccggtttgcgatgaaggatctcggggagttacactacattctaggctgggagatcacgcggaaccgggccgagagaacgatgttcattggtcagcagaagtatgccgagaccgtgctcaagaggttcaacatgcaggactgcaatggctgcaaaacgccgagcacggcggatctgaagctgagcaaggccatgtgtccgaccgaaaacgatgaaaagcaactgatgagatcgaagccatctcgtgctgtggttggcagcctgatgtacctgatgctcggtacccggcccgatcttgcctacctcgttagagagtgcagtcagttcttggaaaacccaggtctgttgcattggagagctgcaaaacgtggattgcgctacctgaaagacacagcggactgggggatccagcttggtggcctagcgtggtcagatcaaaagctggatgaacatctgagagcatacgcagatgcggattttgcaaatcgagttgatgatcgaaagtctgttgcaggctacgtgactcaattttgtgggagcatcatttcgtggagcagccagacggagaagaccgtcgcgctgcacacgaccgaggccgaatatatggctcttagtctactggtgcaggagatagtgcacttgggccaaatgctgaaggagctgcaggtgcagcaaattcagccatcccaagtctttgttgacaacgaaagtgcaaagaagcttgccagcaaccctgtgtttcattctcggaccaagcacatcgatgtgcgccaccacttcgtgcgtgagcgcatcgatttgaaggaaattgacgtgcttcgagtgccaggagttgataacgtggccgatgcttttgcaaagccattggcacgtccggcatttgaaaaacacagagctgcaatgggattattgccaagggcaagatttggagatgcatgttgatgggaatccgtaggtggggctgttgcggattatactgatccccactatactacttgcagttggagtaagacaaaaggtgaaagagaagaatctaggcctcagttgagaatatacacacgaccaacaaagtagcttttgccgcccagctgagtgttgtcgttgcttccatctctgcgtgagcagcaccaagaggacactctacttcacataccataggtaagatacgaccacacgggccgcatcggccccagccgggcggcgtcctgcccgtgtcgtccagctccaagctcgagaacatccgcgccggcaagaagatcgtcacgcacgaaggacgcatggagcccgtgccgccgcgcgcgctcgagacgagcgagatcccgggcatcgtggcggactaccgctcggccgcggagaacgccctcaaagcgggcttcgacggcgtcgagctgcacgccgccaacggctacttgctggagcagttcctgcacgacggcatcaacgaccgcgccgaccagtacggcggcagcgtcgagaaccgcgcgcgcttcctgttcgaggcactggaggccatcctcgagagtctggactcgtccaaggtgggcatccgactgtccccgttcggcggcagcttcggcgacaaggactcggaccccgtcgccacctacacgtacgtgctgaacaggctcaacaactacgacctggcctacgcgcacctgatcgagccgcgtggctaccacgtgcgtgacccgctggcacccgagaagggctcggcgcggcagttccgcgagacgtacaagggcgtgctcctcgccgcgtcgggcttcgaccggcagtcggccgtgcagatcgtggaggagggcgcggccgacgccgtggccatcggccgccacttcatctcgaacccggacctggtgcggcgcttccaactcaacaagcccgtgaacgactacgacacggacacgttctacctcggcgacgcgcgcgggtacacggactataatacccgttcctgcaggacgagtaggtagagcagtaaagacgacgtagacagcaaaagacgtgccacttccgtaagactgcaaggtgaagcgtactggaggtggctgcgtactctcaagtaaaacaaattgttggtagttaaaactaccggtagttgctgcaggcaccaggcacgtactgttactgcctcggtgtgggcttgggcgtcttgttggatcacttggcgcgtttagtgggacggccttcttcaccctcttggttttcacgtgctcgtttcttggatgtttccgtctcgccaccttgatcgcctagtggccctcaccactgccaccaacgtcactctcatcgtcactcttcttccttgtcacccggcgcgtacgctagtgctttacgggcgttctgcaacaacttgtcgcgcgtcgcggtaagcgacaactttgcatacgaactaacgtccttgtttcgtttttcatcttcatcgcgatagtccaggtcgccctccacaagccccagcgggtcatactgagactccaccatgtttgatagcatggaagccacgccgtcgctcaggaacgggtaggtgaccctgttgagcaaacggaggcagatcgtgaaaacaggctcctcctccgagacactcgacacacttgagacgccaggattgctctcgatcttcgcccgcttcttcgcctgactcccgatcgtctgactctcctccttcacctcagaggcgttgcctttcttcttgggcttaagattgtctttcattgtcgtggcatagatgaacttgccgtcactcttccgaccgcgcacattcatgtagatgcgaatggtatcacggacatccgtggagctcagcggtttcggatccccaccaatttcatcagtagatttccccgctgacgagttcccatcactgttctttccgaacacaaaccaggggcatagtttctccgtcgctgccctggaaaacccaccatcgactggggaacgattcttcacttgaatcaacatcatcaacacttcctgctcctcttgttcacccctcgttgtctccccaccgactggcctgctgttggatctcttcttaaacatcgggatcaacaaatcggctccatactggttacgggggaaaatacctgcagcttgacgccccagcaaaaaccaaagcgtgtcctcattcggctcaagctgcaactgcacaaagtgggtgaaccccatgtaccatccatcccacttcgagtgccacttgttgaattctgctctcaaattctccttgctgatcatccgcttgagatatatcggcagctttttcttgccgtgtagcaccttcaagaattgctgcaccggtacaaattgcccgatcgtgtggcaccactgggaaaagtctttgtcccccatcacacacgtgtccatcgccagaagcagcaaaatccgagcaaccatctcgccaatttcgccaactccaccggtgtccaatgcttcatccaaaaggaggttcttgagttgcggcaggatatactttgccaaagcatgtttcagttcataccacactttcatcgctcctaaggcgagcactgggtccgaagcgtagctggtgacgtaaccttctcgcttgaaattcacatacgcgagaatcgccatgaagtcggcagtcgcccgagatgccaaagccgacgttgaatgcgggcgcacgcccagtcggcaaagcatggaggcgacaccaaacatggtatccttgttgtacgcattttgcgaagggggaatccccagtagcagcttgttcgccgcaagattgatcacatcttctctatccgcaggattggggcaagtgctgtaccacatcggacgccccatgcggcacaacgcgtgccaagcttgactcgcatccccggtaacgattctcttgtacatagctatcttagcacgttcttgctgtttcttcttctcttcgtctttttcagctcccaccgcaacctgagtttcctcttccatttcttcatcttctgctcctgcatctagtatttcctctttcatttcttcatcttcgccggcttgtttttcttcacagtattgatcccagtgtgcgtccattgtctcagctaacacaactggcgcaaacgatgccaactctccatcgaaaagccgagatgatggatccaacaacagcggaggcgccaggtccgagatcctggagttcgtatcaatcagcacgccgaaaatgcatccacgatggccgatatctttgttcacggatctgagagcatttcgcaacattcggaagtcattcttcttgcctcccttctcagccagcagacttctcgcttcatcgatcaccagaaccacgattctgccatttggattcttctcggtggaggtatccccctccagcgtatctgtttcatccgaaagtttcgcctttacagaggtgtccgctgccttttcggtaaacagcttcagccattccttctgaacgtccgcccaatgcttgttcgcgtagacgtaaattgtcttcaatcgactggcgatgtcttccacttcggagccttcttgaaacagccaaccacgaagctcgctcgtagccttgggaaaccccgtcgactcgtgcacacgagcacacatgtacaggactttcatgttcaaggcgctcttttgagcctcaatcgcgagttcacgcaccatccgactcttgccgaagccagaactctgcacgaccgccacacatggcgccttgtactttgtgggggtgtaggccttccagcagtcccgcagatactgtgcgaggtcgaggtgggcttcgccgaggtaccggcccttggtgaacgcctccgcgattcgcttcatttcattttcatccaacttgggcgtgccggagcgggcttcagggacaaactttgccaggaggtctttcaccgtcttggccgcaatagtttgtacaagaggtcgagacacgcgtgtatgcccgtatgctcttatgatctccacccatatgaatccatgtatctggttctgggaggtctcgagttggagtgtggctttgttggaatagtcgaccagcatccacgcaacgaaaagatttttctttggcgatgcgtctgctccaagcttcccgctcatctgagcaaagacactgtcgtccacgaacgcggccaaagcctggggatccaactggctggacatgtccatctgcagcagcacagcagtacacagtcagcaatgcggcagtagtatcatgacgacgttggcaagggcgcgggcatgcctgctagtcccggtgggcggtggcgctacaggacaaggcttggaggggaaatgtggaaatggccggttggatttttcttccctcagttttgtaccagaaacacggtaccgcatctacgtgatatacagtgcgcgccgaaattataaccgcaccccaaaaattatttttttaaaccaatgattgtgctttcggcgccaaaccgctgcttatgattcgtctaaaaacgatagaaaacagatgcaacaatcagaatcgaaaaagctgtaaccgtttttttgcaatggacgaaaaaccgactttgggtcgggtcaaaattatagccgcacccggtaagctatcggtaagattggtggagagctgtttcaagcgtaataaatgaactaactccattgaacagctcgaataacgcctaccggtacagtaaagtgcgtcgataaggaacgcctgatatacattgaaagaaaaaggtatattgataattaaaggtttgactcgtcacatgcagacagcaaatgcactgatttactgcactatgtagttcatgtcggacttcgcgaccagagtctcggcttgagcccacgcagccaactcagcataggtagcacccggtagatcacgacggcgatgacagattagcagcgactgaagcttggtcagacgtagccggctctcgaacggtctggaagtggcggtcaccatgggagttgtgagcagcagagcgaaagttggttaatgaggcatgcagacatgtacctggcgcgattcccgcgctcacagcgatcctcatgctcatgattccctctcgcgacctttaggttccatttcccccgacttgggagccgctccatccagccgctcttgaggctcggtttcggaactgtgattggcggaatgttaaacgggaccgaatgattggtagaatcatataactaattcagtacaattggcacacaatgggtacaagcgaggattcatgtcttgtcgtagaatataaaatgtcgcccgttccttatcgacgcacttcactgtagtaagctgctcaaataaggttaagctgacgcggttgataagattcaatggagacacgcactatcttgaatttgtatagaagagtggtgtttgaacagtgtggagaggtctatactcgaagttgaggctgtcagctgactagtgtcttcattggcgtctattcaacatggtagcgatgctgggcttgctcagttcagcaacatgtaccagaaaactcgatcgatttttttccgggtcaatacaaatcctttatacttgatgtttgtattggaaagcaccgccaaacccagtcacaaatttcaatcaagcctagtcccgtacagtgcgtagtttggtaaatacatggctacgtatcaaaagtagagtatttcttcctgaaaataatgcccgagttgcttccagaatcctcctagtgttgtctcggaagtccggccaaattgccaccaagtgtttagtgcgctttatggtattaataattgtgcgaacaataacttcggcgatgcggtacatactgttgcggattatactgatccccactatactacttgcagttagagtaatacaaaaggtgaaagagaagaatctaaacctcagttgagaatatacacacgaccaacaaggtggaatttgccgcccagctgagtgttgtcgttgcttccatctctgcgtgagcagcaccaagaggacactccacttcaggttatgagcccaaggctcacgcgaggggagcacagcaactaggacgtcatggtagagcagaagaagacgcccaaggagtcacacgaggagaagaggacgatcccgccgtttgacggcaaggactacgaggtctggcacgagcgagtcaagctcaaggtggagaggaagaagctgtggaagtactccatggaggacttgctcgagccggacgagagcaaggaggcagaggcgcacgcgacgtggacgagcgagatggcccacgccaacgagatcatctacgacgcaatgacgaatcacataatgaagactgtgaagtatgaacccaccccgtttcgtgtcatggagcgcctgaaaaagagatttatgggcaagacgtacctgaagtacgctgaggagagggccaagctcagtcggctacggctcgctcccaacggcaatgtgccagatcacctgagcgaaatgcgtcggctgatggagaccattgctggagtcgggcgtcctgcggacgagtatgtaaagccagcactattgattggatctctgccgcgcgaatatgatcatgttgtacagacgtttctcgccagccacaagccccaaaatgctgatgatcctcctaattacgaacaacttgaactcgcattggagatggcttacgaccatcgccaaggtcggaaagcagagggcgccaaggacaatgatgatgaagaaaaggcgttctttgctggtggaggaagaggtcgaggacgtggtcgcggccgtggacgtggtggtcgatctggaggacacgggcgcggttccggtggtggacgtggttctggcggtcgcgggagccaaggtggtggacgtggaactggacgtggccaagccggcagtggacaaaagccaggtggtgcttgttatcactgccatgaagcagggcatcatgtgtttgattgcccgtttcttggcaagcgacctccagtcgaggatcgcagcagcacccaagctcagaagcgcgtgaaaatgagtggaggaaagagtgctaaggctgctgaaacgagtagctacgctaatgaaagtgatgacagcgcgtatgttattcttcaagtgatgaaaatgaaaaagccggtcgcagacaaagccaatgataactggtacctggactctggtgcatcgagtcatatttcgaaccagctcactgatttcatggagttcacgcctcttagcgcccggattcgagttggaggaaagaactcgctggattggtactgtggttaaagagctggagactactggtgggaggtgctaactgacgctgcgaggagttcgttatgctccagagctgcagtgcagtctctattctgtgcgacggcaactgaaccaatatctgcctgaacgtgatcgtgtgaaggtgcactttgatgaggcagatcgcgctgatgttatcttacaggctggtgtgactaccgnnnnnnnnnnnnnnnnnnnnnnnnnnnnnnnnnnnnnnnnnnnnnnnnnnnnnnnnnnnnnnnnnnnnnnnnnnnnnnnnnnnnnnnnnnnnnnnnnnnnnnnnnnnnnnnnnnnnnnnnnnnnnnnnnnnnnnnnnnnnnnnnnnnnnnnnnnnnnnnnnnnnnnnnnnnnnnnnnnnnnnnnnnnnnnnnnnnnnnnnnnnnnnnnnnnnnnnnnnnnnnnnnnnnnnnnnnnnnnnnnnnnnnnnnnnnnnnnnnnnnnnnnnnnnnnnnnnnnnnnnnnnnnnnnnnnnnnnnnnnnnnnnnnnnnnnnnnnnnnnnnnnnnnnnnnnnnnnnnnnnnnnnnnnnnnnnnnnnnnnnnnnnnnnnnnnnnnnnnnnnnnnnnnnnnnnnnnnnnnnnnnnnnnnnnnnnnnnnnnnnnnnnnnnnnnnnnnnnnnnnnnnnnnnnnnnnnnnnnnnnnnnnnnnnnnnnnnnnnnnnnnnnnnnnnnnnnnnnnnnnnnnnnnnnnnnnnnnnnnnnnnnnnnnnnnnnnnnnnnnnnnnnnnnnnnnnnnnnnnnnnnnnnnnnnnnnnnnnnnnnnnnnnnnnnnnnnnnnnnnnnnnnnnnnnnnnnnnnnnnnnnnnnnnnnnnnnnnnnnnnnnnnnnnnnnnnnnnnnnnnnnnnnnnnnnnnnnnnnnnnnnnnnnnnnnnnnnnnnnnnnnnnnnnnnnnnnnnnnnnnnnnnnnnnnnnnnnnnnnnnnnnnnnnnnnnnnnnnnnnnnnnnnnnnnnnnnnnnnnnnnnnnnnnnnnnnnnnnnnnnnnnnnnnnnnnnnnnnnnnnnnnnnnnnnnnnnnnnnnnnnnnnnnnnnnnnnnnnnnnnnnnnnnnnnnnnnnnnnnnnnnnnnnnnnnnnnnnnnnnnnnnnnnnnnnnnnnnnnnnnnnnnnnnnnnnnnnnnnnnnnnnnnnnnnnnnnnnnnnnnnnnnnnnnnnnnnnnnnnnnnnnnnnnnnnnnnnnnnnnnnnnnnnnnnnnnnnnnnnnnnnnnnnnnnnnnnnnnnnnnnnnnnnnnnnnnnnnnnnnnnnnnnnnnnnnnnnnnnnnnnnnnnnnnnnnnnnnnnnnnnnnnnnnnnnnnnnnnnnnnnnnnnnnnnnnnnnnnnnnnnnnnnnnnnnnnnnnnnnnnnnnnnnnnnnnnnnnnnnnnnnnnnnnnnnnnnnnnnnnnnnnnnnnnnnnnnnnnnnnnnnnnnnnnnnnnnnnnnnnnnnnnnnnnnnnnnnnnnnnnnnnnnnnnnnnnnnnnnnnnnnnnnnnnnnnnnnnnnnnnnnnnnnnnnnnnnnnnnnnnnnnnnnnnnnnnnnnnnnnnnnnnnnnnnnnnnnnnnnnnnnnnnnnnnnnnnnnnnnnnnnnnnnnnnnnnnnnnnnnnnnnnnnnnnnnnnnnnnnnnnnnnnnnnnnnnnnnnnnnnnnnnnnnnnnnnnnnnnnnnnnnnnnnnnnnnnnnnnnnnnnnnnnnnnnnnnnnnnnnnnnnnnnnnnnnnnnnnnnnnnnnnnnnnnnnnnnnnnnnnnnnnnnnnnnnnnnnnnnnnnnnnnnnnnnnnnnnnnnnnnnnnnnnnnnnnnnnnnnnnnnnnnnnnnnnnnnnnnnnnnnnnnnnnnnnnnnnnnnnnnnnnnnnnnnnnnnnnnnnnnnnnnnnnnnnnnnnnnnnnnnnnnnnnnnnnnnnnnnnnnnnnnnnnnnnnnnnnnnnnnnnnnnnnnnnnnnnnnnnnnnnnnnnnnnnnnnnnnnnnnnnnnnnnnnnnnnnnnnnnnnnnnnnnnnnnnnnnnnnnnnnnnnnnnnnnnnnnnnnnnnnnnnnnnnnnnnnnnnnnnnnnnnnnnnnnnnnnnnnnnnnnnnnnnnnnnnnnnnnnnnnnnnnnnnnnnnnnnnnnnnnnnnnnnnnnnnnnnnnnnnnnnnnnnnnnnnnnnnnnnnnnnnnnnnnnnnnnnnnnnnnnnnnnnnnnnnnnnnnnnnnnnnnnnnnnnnnnnnnnnnnnnnnnnnnnnnnnnnnnnnnnnnnnnnnnnnnnnnnnnnnnnnnnnnnnnnnnnnnnnnnnnnnnnnnnnnnnnnnnnnnnnnnnnnnnnnnnnnnnnnnnnnnnnnnnnnnnnnnnnnnnnnnnnnnnnnnnnnnnnnnnnnnnnnnnnnnnnnnnnnnnnnnnnnnnnnnnnnnnnnnnnnnnnnnnnnnnnnnnnnnnnnnnnnnnnnnnnnnnnnnnnnnnnnnnnnnnnnnnnnnnnnnnnnnnnnnnnnnnnnnnnnnnnnnnnnnnnnnnnnnnnnnnnnnnnnnnnnnnnnnnnnnnnnnnnnnnnnnnnnnnnnnnnnnnnnnnnnnnnnnnnnnnnnnnnnnnnnnnnnnnnnnnnnnnnnnnnnnnnnnnnnnnnnnnnnnnnnnnnnnnnnnnnnnnnnnnnnnnnnnnnnnnnnnnnnnnnnnnnnnnnnnnnnnnnnnnnnnnnnnnnnnnnnnnnnnnnnnnnnnnnnnnnnnnnnnnnnnnnnnnnnnnnnnnnnnnnnnnnnnnnnnnnnnnnnnnnnnnnnnnnnnnnnnnnnnnnnnnnnnnnnnnnnnnnnnnnnnnnnnnnnnnnnnnnnnnnnnnnnnnnnnnnnnnnnnnnnnnnnnnnnnnnnnnnnnnnnnnnnnnnnnnnnnnnnnnnnnnnnnnnnnnnnnnnnnnnnnnnnnnnnnnnnnnnnnnnnnnnnnnnnnnnnnnnnnnnnnnnnnnnnnnnnnnnnnnnnnnnnnnnnnnnnnnnnnnnnnnnnnnnnnnnnnnnnnnnnnnnnnnnnnnnnnnnnnnnnnnnnnnnnnnnnnnnnnnnnnnnnnnnnnnnnnnnnnnnnnnnnnnnnnnnnnnnnnnnnnnnnnnnnnnnnnnnnnnnnnnnnnnnnnnnnnnnnnnnnnnnnnnnnnnnnnnnnnnnnnnnnnnnnnnnnnnnnnnnnnnnnnnnnnnnnnnnnnnnnnnnnnnnnnnnnnnnnnnnnnnnnnnnnnnnnnnnnnnnnnnnnnnnnnnnnnnnnnnnnnnnnnnnnnnnnnnnnnnnnnnnnnnnnnnnnnnnnnnnnnnnnnnnnnnnnnnnnnnnnnnnnnnnnnnnnnnnnnnnnnnnnnnnnnnnnnnnnnnnnnnnnnnnnnnnnnnnnnnnnnnnnnnnnnnnnnnnnnnnnnnnnnnnnnnnnnnnnnnnnnnnnnnnnnnnnnnnnnnnnnnnnnnnnnnnnnnnnnnnnnnnnnnnnnnnnnnnnnnnnnnnnnnnnnnnnnnnnnnnnnnnnnnnnnnnnnnnnnnnnnnnnnnnnnnnnnnnnnnnnnnnnnnnnnnnnnnnnnnnnnnnnnnnnnnnnnnnnnnnnnnnnnnnnnnnnnnnnnnnnnnnnnnnnnnnnnnnnnnnnnnnnnnnnnnnnnnnnnnnnnnnnnnnnnnnnnnnnnnnnnnnnnnnnnnnnnnnnnnnnnnnnnnnnnnnnnnnnnnnnnnnnnnnnnnnnnnnnnnnnnnnnnnnnnnnnnnnnnnnnnnnnnnnnnnnnnnnnnnnnnnnnnnnnnnnnnnnnnnnnnnnnnnnnnnnnnnnnnnnnnnnnnnnnnnnnnnnnnnnnnnnnnnnnnnnnnnnnnnnnnnnnnnnnnnnnnnnnnnnnnnnnnnnnnnnnnnnnnnnnnnnnnnnnnnnnnnnnnnnnnnnnnnnnnnnnnnnnnnnnnnnnnnnnnnnnnnnnnnnnnnnnnnnnnnnnnnnnnnnnnnnnnnnnnnnnnnnnnnnnnnnnnnnnnnnnnnnnnnnnnnnnnnnnnnnnnnnnnnnnnnnnnnnnnnnnnnnnnnnnnnnnnnnnnnnnnnnnnnnnnnnnnnnnnnnnnnnnnnnnnnnnnnnnnnnnnnnnnnnnnnnnnnnnnnnnnnnnnnnnnnnnnnnnnnnnnnnnnnnnnnnnnnnnnnnnnnnnnnnnnnnnnnnnnnnnnnnnnnnnnnnnnnnnnnnnnnnnnnnnnnnnnnnnnnnnnnnnnnnnnnnnnnnnnnnnnnnnnnnnnnnnnnnnnnnnnnnnnnnnnnnnnnnnnnnnnnnnnnnnnnnnnnnnnnnnnnnnnnnnnnnnnnnnnnnnnnnnnnnnnnnnnnnnnnnnnnnnnnnnnnnnnnnnnnnnnnnnnnnnnnnnnnnnnnnnnnnnnnnnnnnnnnnnnnnnnnnnnnnnnnnnnnnnnnnnnnnnnnnnnnnnnnnnnnnnnnnnnnnnnnnnnnnnnnnnnnnnnnnnnnnnnnnnnnnnnnnnnnnnnnnnnnnnnnnnnnnnnnnnnnnnnnnnnnnnnnnnnnnnnnnnnnnnnnnnnnnnnnnnnnnnnnnnnnnnnnnnnnnnnnnnnnnnnnnnnnnnnnnnnnnnnnnnnnnnnnnnnnnnnnnnnnnnnnnnnnnnnnnnnnnnnnnnnnnnnnnnnnnnnnnnnnnnnnnnnnnnnnnnnnnnnnnnnnnnnnnnnnnnnnnnnnnnnnnnnnnnnnnnnnnnnnnnnnnnnnnnnnnnnnnnnnnnnnnnnnnnnnnnnnnnnnnnnnnnnnnnnnnnnnnnnnnnnnnnnnnnnnnnnnnnnnnnnnnnnnnnnnnnnnnnnnnnnnnnnnnnnnnnnnnnnnnnnnnnnnnnnnnnnnnnnnnnnnnnnnnnnnnnnnnnnnnnnnnnnnnnnnnnnnnnnnnnnnnnnnnnnnnnnnnnnnnnnnnnnnnnnnnnnnnnnnnnnnnnnnnnnnnnnnnnnnnnnnnnnnnnnnnnnnnnnnnnnnnnnnnnnnnnnnnnnnnnnnnnnnnnnnnnnnnnnnnnnnnnnnnnnnnnnnnnnnnnnnnnnnnnnnnnnnnnnnnnnnnnnnnnnnnnnnnnnnnnnnnnnnnnnnnnnnnnnnnnnnnnnnnnnnnnnnnnnnnnnnnnnnnnnnnnnnnnnnnnnnnnnnnnnnnnnnnnnnnnnnnnnnnnnnnnnnnnnnnnnnnnnnnnnnnnnnnnnnnnnnnnnnnnnnnnnnnnnnnnnnnnnnnnnnnnnnnnnnnnnnnnnnnnnnnnnnnnnnnnnnnnnnnnnnnnnnnnnnnnnnnnnnnnnnnnnnnnnnnnnnnnnnnnnnnnnnnnnnnnnnnnnnnnnnnnnnnnnnnnnnnnnnnnnnnnnnnnnnnnnnnnnnnnnnnnnnnnnnnnnnnnnnnnnnnnnnnnnnnnnnnnnnnnnnnnnnnnnnnnnnnnnnnnnnnnnnnnnnnnnnnnnnnnnnnnnnnnnnnnnnnnnnnnnnnnnnnnnnnnnnnnnnnnnnnnnnnnnnnnnnnnnnnnnnnnnnnnnnnnnnnnnnnnnnnnnnnnnnnnnnnnnnnnnnnnnnnnnnnnnnnnnnnnnnnnnnnnnnnnnnnnnnnnnnnnnnnnnnnnnnnnnnnnnnnnnnnnnnnnnnnnnnnnnnnnnnnnnnnnnnnnnnnnnnnnnnnnnnnnnnnnnnnnnnnnnnnnnnnnnnnnnnnnnnnnnnnnnnnnnnnnnnnnnnnnnnnnnnnnnnnnnnnnnnnnnnnnnnnnnnnnnnnnnnnnnnnnnnnnnnnnnnnnnnnnnnnnnnnnnnnnnnnnnnnnnnnnnnnnnnnnnnnnnnnnnnnnnnnnnnnnnnnnnnnnnnnnnnnnnnnnnnnnnnnnnnnnnnnnnnnnnnnnnnnnnnnnnnnnnnnnnnnnnnnnnnnnnnnnnnnnnnnnnnnnnnnnnnnnnnnnnnnnnnnnnnnnnnnnnnnnnnnnnnnnnnnnnnnnnnnnnnnnnnnnnnnnnnnnnnnnnnnnnnnnnnnnnnnnnnnnnnnnnnnnnnnnnnnnnnnnnnnnnnnnnnnnnnnnnnnnnnnnnnnnnnnnnnnnnnnnnnnnnnnnnnnnnnnnnnnnnnnnnnnnnnnnnnnnnnnnnnnnnnnnnnnnnnnnnnnnnnnnnnnnnnnnnnnnnnnnnnnnnnnnnnnnnnnnnnnnnnnnnnnnnnnnnnnnnnnnnnnnnnnnnnnnnnnnnnnnnnnnnnnnnnnnnnnnnnnnnnnnnnnnnnnnnnnnnnnnnnnnnnnnnnnnnnnnnnnnnnnnnnnnnnnnnnnnnnnnnnnnnnnnnnnnnnnnnnnnnnnnnnnnnnnnnnnnnnnnnnnnnnnnnnnnnnnnnnnnnnnnnnnnnnnnnnnnnnnnnnnnnnnnnnnnnnnnnnnnnnnnnnnnnnnnnnnnnnnnnnnnnnnnnnnnnnnnnnnnnnnnnnnnnnnnnnnnnnnnnnnnnnnnnnnnnnnnnnnnnnnnnnnnnnnnnnnnnnnnnnnnnnnnnnnnnnnnnnnnnnnnnnnnnnnnnnnnnnnnnnnnnnnnnnnnnnnnnnnnnnnnnnnnnnnnnnnnnnnnnnnnnnnnnnnnnnnnnnnnnnnnnnnnnnnnnnnnnnnnnnnnnnnnnnnnnnnnnnnnnnnnnnnnnnnnnnnnnnnnnnnnnnnnnnnnnnnnnnnnnnnnnnnnnnnnnnnnnnnnnnnnnnnnnnnnnnnnnnnnnnnnnnnnnnnnnnnnnnnnnnnnnnnnnnnnnnnnnnnnnnnnnnnnnnnnnnnnnnnnnnnnnnnnnnnnnnnnnnnnnnnnnnnnnnnnnnnnnnnnnnnnnnnnnnnnnnnnnnnnnnnnnnnnnnnnnnnnnnnnnnnnnnnnnnnnnnnnnnnnnnnnnnnnnnnnnnnnnnnnnnnnnnnnnnnnnnnnnnnnnnnnnnnnnnnnnnnnnnnnnnnnnnnnnnnnnnnnnnnnnnnnnnnnnnnnnnnnnnnnnnnnnnnnnnnnnnnnnnnnnnnnnnnnnnnnnnnnnnnnnnnnnnnnnnnnnnnnnnnnnnnnnnnnnnnnnnnnnnnnnnnnnnnnnnnnnnnnnnnnnnnnnnnnnnnnnnnnnnnnnnnnnnnnnnnnnnnnnnnnnnnnnnnnnnnnnnnnnnnnnnnnnnnnnnnnnnnnnnnnnnnnnnnnnnnnnnnnnnnnnnnnnnnnnnnnnnnnnnnnnnnnnnnnnnnnnnnnnnnnnnnnnnnnnnnnnnnnnnnnnnnnnnnnnnnnnnnnnnnnnnnnnnnnnnnnnnnnnnnnnnnnnnnnnnnnnnnnnnnnnnnnnnnnnnnnnnnnnnnnnnnnnnnnnnnnnnnnnnnnnnnnnnnnnnnnnnnnnnnnnnnnnnnnnnnnnnnnnnnnnnnnnnnnnnnnnnnnnnnnnnnnnnnnnnnnnnnnnnnnnnnnnnnnnnnnnnnnnnnnnnnnnnnnnnnnnnnnnnnnnnnnnnnnnnnnnnnnnnnnnnnnnnnnnnnnnnnnnnnnnnnnnnnnnnnnnnnnnnnnnnnnnnnnnnnnnnnnnnnnnnnnnnnnnnnnnnnnnnnnnnnnnnnnnnnnnnnnnnnnnnnnnnnnnnnnnnnnnnnnnnnnnnnnnnnnnnnnnnnnnnnnnnnnnnnnnnnnnnnnnnnnnnnnnnnnnnnnnnnnnnnnnnnnnnnnnnnnnnnnnnnnnnnnnnnnnnnnnnnnnnnnnnnnnnnnnnnnnnnnnnnnnnnnnnnnnnnnnnnnnnnnnnnnnnnnnnnnnnnnnnnnnnnnnnnnnnnnnnnnnnnnnnnnnnnnnnnnnnnnnnnnnnnnnnnnnnnnnnnnnnnnnnnnnnnnnnnnnnnnnnnnnnnnnnnnnnnnnnnnnnnnnnnnnnnnnnnnnnnnnnnnnnnnnnnnnnnnnnnnnnnnnnnnnnnnnnnnnnnnnnnnnnnnnnnnnnnnnnnnnnnnnnnnnnnnnnnnnnnnnnnnnnnnnnnnnnnnnnnnnnnnnnnnnnnnnnnnnnnnnnnnnnnnnnnnnnnnnnnnnnnnnnnnnnnnnnnnnnnnnnnnnnnnnnnnnnnnnnnnnnnnnnnnnnnnnnnnnnnnnnnnnnnnnnnnnnnnnnnnnnnnnnnnnnnnnnnnnnnnnnnnnnnnnnnnnnnnnnnnnnnnnnnnnnnnnnnnnnnnnnnnnnnnnnnnnnnnnnnnnnnnnnnnnnnnnnnnnnnnnnnnnnnnnnnnnnnnnnnnnnnnnnnnnnnnnnnnnnnnnnnnnnnnnnnnnnnnnnnnnnnnnnnnnnnnnnnnnnnnnnnnnnnnnnnnnnnnnnnnnnnnnnnnnnnnnnnnnnnnnnnnnnnnnnnnnnnnnnnnnnnnnnnnnnnnnnnnnnnnnnnnnnnnnnnnnnnnnnnnnnnnnnnnnnnnnnnnnnnnnnnnnnnnnnnnnnnnnnnnnnnnnnnnnnnnnnnnnnnnnnnnnnnnnnnnnnnnnnnnnnnnnnnnnnnnnnnnnnnnnnnnnnnnnnnnnnnnnnnnnnnnnnnnnnnnnnnnnnnnnnnnnnnnnnnnnnnnnnnnnnnnnnnnnnnnnnnnnnnnnnnnnnnnnnnnnnnnnnnnnnnnnnnnnnnnnnnnnnnnnnnnnnnnnnnnnnnnnnnnnnnnnnnnnnnnnnnnnnnnnnnnnnnnnnnnnnnnnnnnnnnnnnnnnnnnnnnnnnnnnnnnnnnnnnnnnnnnnnnnnnnnnnnnnnnnnnnnnnnnnnnnnnnnnnnnnnnnnnnnnnnnnnnnnnnnnnnnnnnnnnnnnnnnnnnnnnnnnnnnnnnnnnnnnnnnnnnnnnnnnnnnnnnnnnnnnnnnnnnnnnnnnnnnnnnnnnnnnnnnnnnnnnnnnnnnnnnnnnnnnnnnnnnnnnnnnnnnnnnnnnnnnnnnnnnnnnnnnnnnnnnnnnnnnnnnnnnnnnnnnnnnnnnnnnnnnnnnnnnnnnnnnnnnnnnnnnnnnnnnnnnnnnnnnnnnnnnnnnnnnnnnnnnnnnnnnnnnnnnnnnnnnnnnnnnnnnnnnnnnnnnnnnnnnnnnnnnnnnnnnnnnnnnnnnnnnnnnnnnnnnnnnnnnnnnnnnnnnnnnnnnnnnnnnnnnnnnnnnnnnnnnnnnnnnnnnnnnnnnnnnnnnnnnnnnnnnnnnnnnnnnnnnnnnnnnnnnnnnnnnnnnnnnnnnnnnnnnnnnnnnnnnnnnnnnnnnnnnnnnnnnnnnnnnnnnnnnnnnnnnnnnnnnnnnnnnnnnnnnnnnnnnnnnnnnnnnnnnnnnnnnnnnnnnnnnnnnnnnnnnnnnnnnnnnnnnnnnnnnnnnnnnnnnnnnnnnnnnnnnnnnnnnnnnnnnnnnnnnnnnnnnnnnnnnnnnnnnnnnnnnnnnnnnnnnnnnnnnnnnnnnnnnnnnnnnnnnnnnnnnnnnnnnnnnnnnnnnnnnnnnnnnnnnnnnnnnnnnnnnnnnnnnnnnnnnnnnnnnnnnnnnnnnnnnnnnnnnnnnnnnnnnnnnnnnnnnnnnnnnnnnnnnnnnnnnnnnnnnnnnnnnnnnnnnnnnnnnnnnnnnnnnnnnnnnnnnnnnnnnnnnnnnnnnnnnnnnnnnnnnnnnnnnnnnnnnnnnnnnnnnnnnnnnnnnnnnnnnnnnnnnnnnnnnnnnnnnnnnnnnnnnnnnnnnnnnnnnnnnnnnnnnnnnnnnnnnnnnnnnnnnnnnnnnnnnnnnnnnnnnnnnnnnnnnnnnnnnnnnnnnnnnnnnnnnnnnnnnnnnnnnnnnnnnnnnnnnnnnnnnnnnnnnnnnnnnnnnnnnnnnnnnnnnnnnnnnnnnnnnnnnnnnnnnnnnnnnnnnnnnnnnnnnnnnnnnnnnnnnnnnnnnnnnnnnnnnnnnnnnnnnnnnnnnnnnnnnnnnnnnnnnnnnnnnnnnnnnnnnnnnnnnnnnnnnnnnnnnnnnnnnnnnnnnnnnnnnnnnnnnnnnnnnnnnnnnnnnnnnnnnnnnnnnnnnnnnnnnnnnnnnnnnnnnnnnnnnnnnnnnnnnnnnnnnnnnnnnnnnnnnnnnnnnnnnnnnnnnnnnnnnnnnnnnnnnnnnnnnnnnnnnnnnnnnnnnnnnnnnnnnnnnnnnnnnnnnnnnnnnnnnnnnnnnnnnnnnnnnnnnnnnnnnnnnnnnnncgcacaaacgtgtgttgcaagagcgtcctcggaggtgcttcagggaagaagtcgctcaatgcggaaatgcactgtgtgcaagttcgagggcagagatcctaccgagaaaccgactactgcgagacccatcgagttgcgttgtgcaagcgcacataccctgttgaccctacgaagcagcatctgtgccaacagcaaacttggacttgctggcagaaataccatttgttttacttgccgaagcaagtgtacactgtcgacggcaacttgcgacgaacctctccaatttatgtagctaaccgtccatttctgaaggcccgccaagaccaaaagaaggctaacgcagccaccaaggcgtaacctcacatcattttttcaagatagtcaaagtcaactaaccatttatacttcactgcactaagtcacacctattccatctgcccccgctagtcttgatgccgtaaatgcggatttagctcgtggctgacaacatactgctttaccactggtgcaccatagcggcaagctaaccacactccactgcgtataatccgacaggatgctattagaaattccacgcgcctccaagccgaacaataactcccaactgtgtatatgtcagcgaagacgcctcagaccacatccagcacggccacgttcgccaccaccacatctgaggtcatgctgctgacggcgctgccacggccgctgccctcgctgcccgagtcgcccgctaccattgcgtccgactccatgctgacgaagttgcctccgatctcctcccgtacggacacgatctctacaaaggacgtcatgctgttgatgccgctgacggtactgctggcacctctacaacggtctccttccgcactgtcgatgcatttacgcacgctgtctggtcaccggtcacatccttgccaacctccgtgccggtggaggcacccacgaccacctccagcacgacaacggtcacgcccaaagcgtccgtggtcatgatgttgccggcgcacacacggcgctgcgaccgccgttatgcttgctgcccgagtcccccgccgccatcgcgtccgtgtccgtgtccatgtcggcggagacgcccctgaccgcgtcctccaaggccacggtcacctccatcgtgtccgagaccctgctgccgatgtcgctggcggcactgctgccgctacttccggcggcgacctgtgtgcggctgccgctggcgttgtgctcgacgatcgcatccgtgcccctggggacacaatagtgttgatagatatactacagaagacacaatagcgtggggtttttacctatccctcttagctgtatgattggtcataaacggcgaggaaactgccgtggctcagaaaattgctgtttcagttatcttgctactacatcaccagtaaaaagatacttgatgtatcattctggtaacgatagggttaagctatctatcgtttttnnnnnnnnnnnnnnnnnnnnnnnnnnnnnnnnnnnnnnnnnnnnnnnnnnnnnnnnnnnnnnnnnnnnnnnnnnnnnnnnnnnnnnnnnnnnnnnnnnnnnnnnnnnnnnnnnnnnnnnnnnnnnnnnnnnnnnnnnnnnnnnnnnnnnnnnnnnnnnnnnnnnnnnnnnnnnnnnnnnnnnnnnnnnnnnnnnnnnnnnnnnnnnnnnnnnnnnnnnnnnnnnnnnnnnnnnnnnnnnnnnnnnnnnnnnnnnnnnnnnnnnnnnnnnnnnnnnnnnnnnnnnnnnnnnnnnnnnnnnnnnnnnnnnnnnnnnnnnnnnnnnnnnnnnnnnnnnnnnnnnnnnnnnnnnnnnnnnnnnnnnnnnnnnnnnnnnnnnnnnnnnnnnnnnnnnnnnnnnnnnnnnnnnnnnnnnnnnnnnnnnnnnnnnnnnnnnnnnnnnnnnnnnnnnnnnnnnnnnnnnnnnnnnnnnnnnnnnnnnnnnnnnnnnnnnnnnnnnnnnnnnnnnnnnnnnnnnnnnnnnnnnnnnnnnnnnnnnnnnnnnnnnnnnnnnnnnnnnnnnnnnnnnnnnnnnnnnnnnnnnnnnnnnnnnnnnnnnnnnnnnnnnnnnnnnnnnnnnnnnnnnnnnnnnnnnnnnnnnnnnnnnnnnnnnnnnnnnnnnnnnnnnnnnnnnnnnnnnnnnnnnnnnnnnnnnnnnnnnnnnnnnnnnnnnnnnnnnnnnnnnnnnnnnnnnnnnnnnnnnnnnnnnnnnnnnnnnnnnnnnnnnnnnnnnnnnnnnnnnnnnnnnnnnnnnnnnnnnnnnnnnnnnnnnnnnnnnnnnnnnnnnnnnnnnnnnnnnnnnnnnnnnnnnnnnnnnnnnnnnnnnnnnnnnnnnnnnnnnnnnnnnnnnnnnnnnnnnnnnnnnnnnnnnnnnnnnnnnnnnnnnnnnnnnnnnnnnnnnnnnnnnnnnnnnnnnnnnnnnnnnnnnnnnnnnnnnnnnnnnnnnnnnnnnnnnnnnnnnnnnnnnnnnnnnnnnnnnnnnnnnnnnnnnnnnnnnnnnnnnnnnnnnnnnnnnnnnnnnnnnnnnnnnnnnnnnnnnnnnnnnnnnnnnnnnnnnnnnnnnnnnnnnnnnnnnnnnnnnnnnnnnnnnnnnnnnnnnnnnnnnnnnnnnnnnnnnnnnnnnnnnnnnnnnnnnnnnnnnnnnnnnnnnnnnnnnnnnnnnnnnnnnnnnnnnnnnnnnnnnnnnnnnnnnnnnnnnnnnnnnnnnnnnnnnnnnnnnnnnnnnnnnnnnnnnnnnnnnnnnnnnnnnnnnnnnnnnnnnnnnnnnnnnnnnnnnnnnnnnnnnnnnnnnnnnnnnnnnnnnnnnnnnnnnnnnnnnnnnnnnnnnnnnnnnnnnnnnnnnnnnnnnnnnnnnnnnnnnnnnnnnnnnnnnnnnnnnnnnnnnnnnnnnnnnnnnnnnnnnnnnnnnnnnnnnnnnnnnnnnnnnnnnnnnnnnnnnnnnnnnnnnnnnnnnnnnnnnnnnnnnnnnnnnnnnnnnnnnnnnnnnnnnnnnnnnnnnnnnnnnnnnnnnnnnnnnnnnnnnnnnnnnnnnnnnnnnnnnnnnnnnnnnnnnnnnnnnnnnnnnnnnnnnnnnnnnnnnnnnnnnnnnnnnnnnnnnnnnnnnnnnnnnnnnnnnnnnnnnnnnnnnnnnnnnnnnnnnnnnnnnnnnnnnnnnnnnnnnnnnnnnnnnnnnnnnnnnnnnnnnnnnnnnnnnnnnnnnnnnnnnnnnnnnnnnnnnnnnnnnnnnnnnnnnnnnnnnnnnnnnnnnnnnnnnnnnnnnnnnnnnnnnnnnnnnnnnnnnnnnnnnnnnnnnnnnnnnnnnnnnnnnnnnnnnnnnnnnnnnnnnnnnnnnnnnnnnnnnnnnnnnnnnnnnnnnnnnnnnnnnnnnnnnnnnnnnnnnnnnnnnnnnnnnnnnnnnnnnnnnnnnnnnnnnnnnnnnnnnnnnnnnnnnnnnnnnnnnnnnnnnnnnnnnnnnnnnnnnnnnnnnnnnnnnnnnnnnnnnnnnnnnnnnnnnnnnnnnnnnnnnnnnnnnnnnnnnnnnnnnnnnnnnnnnnnnnnnnnnnnnnnnnnnnnnnnnnnnnnnnnnnnnnnnnnnnnnnnnnnnnnnnnnnnnnnnnnnnnnnnnnnnnnnnnnnnnnnnnnnnnnnnnnnnnnnnnnnnnnnnnnnnnnnnnnnnnnnnnnnnnnnnnnnnnnnnnnnnnnnnnnnnnnnnnnnnnnnnnnnnnnnnnnnnnnnnnnnnnnnnnnnnnnnnnnnnnnnnnnnnnnnnnnnnnnnnnnnnnnnnnnnnnnnnnnnnnnnnnnnnnnnnnnnnnnnnnnnnnnnnnnnnnnnnnnnnnnnnnnnnnnnnnnnnnnnnnnnnnnnnnnnnnnnnnnnnnnnnnnnnnnnnnnnnnnnnnnnnnnnnnnnnnnnnnnnnnnnnnnnnnnnnnnnnnnnnnnnnnnnnnnnnnnnnnnnnnnnnnnnnnnnnnnnnnnnnnnnnnnnnnnnnnnnnnnnnnnnnnnnnnnnnnnnnnnnnnnnnnnnnnnnnnnnnnnnnnnnnnnnnnnnnnnnnnnnnnnnnnnnnnnnnnnnnnnnnnnnnnnnnnnnnnnnnnnnnnnnnnnnnnnnnnnnnnnnnnnnnnnnnnnnnnnnnnnnnnnnnnnnnnnnnnnnnnnnnnnnnnnnnnnnnnnnnnnnnnnnnnnnnnnnnnnnnnnnnnnnnnnnnnnnnnnnnnnnnnnnnnnnnnnnnnnnnnnnnnnnnnnnnnnnnnnnnnnnnnnnnnnnnnnnnnnnnnnnnnnnnnnnnnnnnnnnnnnnnnnnnnnnnnacgtcgagaaatcctgcagttgtcgagtactacaagcagcgcgcgacgcccggcggcctcatcatcgccgaggccaccaacatcacgcccacgggccgcggatcctggggctccgcaaatcgaggcttggcgcaacgtgaccaaggccgtgcacggcaagatgttcctgcagttgtcggactaccgctcggccgcggagaacgccctcaaagcgggcttcgacggcgtcgagctgcacgccgccaacggctacttgctggagcagttcctgcacgacggcatcaacgaccgcgccgaccagtacggcggcagcgtcgagaaccgcgcgcgcttcctgttcgaggcactggaggccatcctcgagagtctggactcgtccaaggtgggcatccgactgtccccgttcggcggcagcttcggcaacaaggactcggaccccgtcgccacctacacgtacgtgctgaacaggctcaacaactacgacctggcctacgcgcacctgatcgagccgcgtggctaccacgtgcgtgacccgctggcacccgagaagggctcggcgcggcagttccgcgagacgtacaagggcgtgctcctcgccgcgtcgggcttcgaccggcagtcggccgtgcagatcgtggaggagggcgcggccgacgccgtggccatcggccgccacttcatctcgaacccggacctggtgcggcgcttccaactcaacaagcccgtgaacgactacgacacggacacgttctacctcggcgacgcgcgcgggtacacggactataatacccgttcctgcaggacgagtaggtagagcagtaaagacgacgtagacagcaaaagacgtgctacttccgtaagaactgcaaggtgaagcgtactggaggtggctgcgtactctcaagtaaaacaaattgttggtagttaaaactagttgctgcaggcaccaggtacgtactgttactgcctcggtgtgggcttgggcgtcttgttggatcacttggcgcgtttagtgggacggccttcttcaccctcttggttttcacgtgctcgtttcttggatgtttccgtctcgccaccttgatcgcctagtggccctcaccactgccaccaacgtcactctcagcgtcactcttcttccttgtcacccggcgcgtacgctagtgctttacgggcgttctgcaacaacttgtcgcgcttcgcggtaagcgacaactttgcatacgaactaacgtccttgtttcgtttttcatcttcatcgcgatagtccaggtcgccctccacaagccccagcgggtcatactgagactccaccatgtttgatagaatggaagccacgtcctcgctcaggaacgggtaggtgaccctgttgagtaaacggaggcagatcgtgaaaacaggatcctcctccgagacactcgacacacttgagacgccaggattgctctcgatcttcgcccgcttcttcgcctgactcccgatcgtctgactctcctccttcacctcagaggcgttgcctttcttcttgggcttaagattgtctttcattgtcgtggcatagatgaacttgccgtcacgcgttctaccgcgcacattcatgtagatgcgaatggtatcacggacatccgtggaacccagcggtttcggatccctaccaatttcatcagtagatttccccgctgacgagttcccatcactgttctttccgaacacaaaccaggggcctagtctctccgtcgctgccttggaaaattctccatcgactggggaacgattcttcacttgaatcaacatcatcaacacctcatgcccctcctgctcacccctcgtagtctccccaccgactggcctgctgttggatctcttcttaaacatcgggatcaacaaatcggctccattctggttacgggggaaaatacccgcagcctgacgtcccagcaaaaaccaaagcgtgtcctcattcggctcgagctgcaactgcacaaagtgggtgaaccccacgtaccaaccatcccacttcgagcaccacttgttgaattctggtctcaaattctccttgctgatcatcctcttgagatatatcggcagctttttcttgccttgtagcacgtccaagaaatcctgcaccggtacaaattgcccgatcgtgtggtagcactgggaaaagtctttgtcccccatcacacacgtgtccatcgccagaagcagcaaaatccgagcaaccatctcgccaatttcgccaactccaccggtgtctaatgcttcatccaaaaggaggttcttgagttgcggcaggatatactttgccaaaccatgtttcagttcataccacactttcatcgctcctaaggcgagcactgggtccgaagcgtagctggtgacgtaaccctctcgtttgaaattcacatacgcgagaatcgccatgaagtcggcagtcgaccgagatgccagagccgacgttgaatgcgggcgcacgcccagacggcaaagcatggaggcgacaccaagcatggtatccttgttgtacgcattttgcgaagggggaatccccagtagcagcttgttcgccgcaagattgatcacgtcttctctatccgcaggattggggcaagtgctgtaccacatcggacgccccatacacctcaatgcttcccaggcctcggccttgcttccagttacgactgtcttgtacatagctatcttagcacgttcttgctgtttcgttttctcttcgtcttcagctcccaccgcaacttgggttccctcgtttatctcttcatcttcaaagtagtcatcccagtgtgcgtccatcgtatcagnnnnnnnnnnnnnnnnnnnnnnnnnnnnnnnnnnnnnnnnnnnnnnnnnnnnnnnnnnnnnnnnnnnnnnnnnnnnnnnnnnnnnnnnnnnnnnnnnnnnnnnnnnnnnnnnnnnnnnnnnnnnnnnnnnacagctcgaataacgcctaccggtacagtaaagtgcgtcgataaggaacgcctgatatacattgaaagaaaaaggtatattgataattaaaggtttgactcgtcacatgcagacagcaaatgcactgatttactgcaatatgtagttcatgtcggacttcgcgaccagagtctcggcttgagcccacgcagccaactcagcataggtagcacccggtagatcacgacggcgatgacagattagcagcgactgaagcttggtcagacgtagccacctctggaacggtctggaagtggcggtcaccatgggagttgtgagcagcagagcgaaagttggttaatgaggcatgcagacatgtacctggcgcgattcccgcgctcacagcgatcctcatgctcatgattccctctcgcgacctttaggttccatttcccccgacttgggagccgctccatccagccgctcttgaggctcggtttcggaactgtgattggcggaatgttaaacgggaccgaatgattggtagaatcatataactaattcagtacaattggcacacaatgggtacaagcgaggattcatgtcttgtcgtagaatataaaatgtcgcccgttccttatcgacgcacttcactgtagtaagctgctcaaataaggttaagctgacgcggttgataagattcaatggagacacgcactatcttgaatttgtatagaagagtagtgtggagaggtctatactcgtaagttgaggctgtcagctgactagtgtcttcattggcgtctatagcgatgctgggcttgctcagttcagcaacatgtaccagaaaactcgatcgatttttttccgggtcaatacaaatcctttatacttgatgtttgtattggaaagcaccgccaaacccagtcacaaatttcaatcaagtctagtcccgtacagtgcgtagtttggtaaatacatggctacgtatcaaaagtagagtatttcttcctgaaaataatgcccgagttttgcttccagaatcctcctagtgttgtctcggaagtccggccaaattgccaccaagtgtttagtgcgctttatggtattaataaatgtgcgaacaataacttcggcgatgcggtacataccataggtaagatacgaccacacgggccgcatcggccccagccgggcggcgtcctgcgcgccggcaagaagatcgtcacgcgcgaaggacgcatggagcccgtgccgccgcgcgcgctcgagacgagcgagatcccgggcatcgtggcggactaccgctcggccgcggagaacgccctcaaagcgggcttcgacggcgtcgagctgcacgccgccaacggctactgnnnnnnnnnnnnnnnnnnnnnnnnnnnnnnnnnnnnnnnnnnnnnnnnnnnnnnnnnnnnnnnnnnnnnnnnnnnnnnnnnnnnnnnnnnnnnnnnnnnnnnnnnnnnnnnnnnnnnnnnnnnnnnnnnnnnnnnnnnnnnnnnnnnnnnnnnnnnnnnnnnnnnnnnnnnnnnnnnnnnnnnnnnnnnnnnnnnnnnnnnnnnnnnnnnnnnnnnnnnnnnnnnnnnnnnnnnnnnnnnnnnnnnnnnnnnnnnnnnnnnnnnnnnnnnnnnnnnnnnnnnnnnnnnnnnnnnnnnnnnnnnnnnnnnnnnnnnnnnnnnnnnnnnnnnnnnnnnnnnnnnnnnnnnnnnnnnnnnnnnnnnnnnnnnnnnnnnnnnnnnnnnnnnnnnnnnnnnnnnnnnnnnnnnnnnnnnnnnnnnnnnnnnnnnnnnnnnnnnnnnnnnnnnnnnnnnnnnnnnnnnnnnnnnnnnnnnnnnnnnnnnnnnnnnnnnnnnnnnnnnnnnnnnnnnnnnnnnnnnnnnnnnnnnnnnnnnnnnnnnnnnnnnnnnnnnnnnnnnnnnnnnnnnnnnnnnnnnnnnnnnnnnnnnnnnnnnnnnnnnnnnnnnnnnnnnnnnnnnnnnnnnnnnnnnnnnnnnnnnnnnnnnnnnnnnnnnnnnnnnnnnnnnnnnnnnnnnnnnnnnnnnnnnnnnnnnnnnnnnnnnnnnnnnnnnnnnnnnnnnnnnnnnnnnnnnnnnnnnnnnnnnnnnnnnnnnnnnnnnnnnnnnnnnnnnnnnnnnnnnnnnnnnnnnnnnnnnnnnnnnnnnnnnnnnnnnnnnnnnnnnnnnnnnnnnnnnnnnnnnnnnnnnnnnnnnnnnnnnnnnnnnnnnnnnnnnnnnnnnnnnnnnnnnnnnnnnnnnnnnnnnnnnnnnnnnnnnnnnnnnnnnnnnnnnnnnnnnnnnnnnnnnnnnnnnnnnnnnnnnnnnnnnnnnnnnnnnnnnnnnnnnnnnnnnnnnnnnnnnnnnnnnnnnnnnnnnnnnnnnnnnnnnnnnnnnnnnnnnnnnnnnnnnnnnnnnnnnnnnnnnnnnnnnnnnnnnnnnnnnnnnnnnnnnnnnnnnnnnnnnnnnnnnnnnnnnnnnnnnnnnnnnnnnnnnnnnnnnnnnnnnnnnnnnnnnnnnnnnnnnnnnnnnnnnnnnnnnnnnnnnnnnnnnnnnnnnnnnnnnnnnnnnnnnnnnnnnnnnnnnnnnnnnnnnnnnnnnnnnnnnnnnnnnnnnnnnnnnnnnnnnnnnnnnnnnnnnnnnnnnnnnnnnnnnnnnnnnnnnnnnnnnnnnnnnnnnnnnnnnnnnnnnnnnnnnnnnnnnnnnnnnnnnnnnnnnnnnnnnnnnnnnnnnnnnnnnnnnnnnnnnnnnnnnnnnnnnnnnnnnnnnnnnnnnnnnnnnnnnnnnnnnnnnnnnnnnnnnnnnnnnnnnnnnnnnnnnnnnnnnnnnnnnnnnnnnnnnnnnnnnnnnnnnnnnnnnnnnnnnnnnnnnnnnnnnnnnnnnnnnnnnnnnnnnnnnnnnnnnnnnnnnnnnnnnnnnnnnnnnnnnnnnnnnnnnnnnnnnnnnnnnnnnnnnnnnnnnnnnnnnnnnnnnnnnnnnnnnnnnnnnnnnnnnnnnnnnnnnnnnnnnnnnnnnnnnnnnnnnnnnnnnnnnnnnnnnnnnnnnnnnnnnnnnnnnnnnnnnnnnnnnnnnnnnnnnnnnnnnnnnnnnnnnnnnnnnnnnnnnnnnnnnnnnnnnnnnnnnnnnnnnnnnnnnnnnnnnnnnnnnnnnnnnnnnnnnnnnnnnnnnnnnnnnnnnnnnnnnnnnnnnnnnnnnnnnnnnnnnnnnnnnnnnnnnnnnnnnnnnnnnnnnnnnnnnnnnnnnnnnnnnnnnnnnnnnnnnnnnnnnnnnnnnnnnnnnnnnnnnnnnnnnnnnnnnncgaagtatattgaatgtccctttccattctgcgcgaggtacttagatgtagggctctacaaccctggtgtaccagtatgcgtgatgaagctgggaagaccaagacacttgaacgtcgatacgctgtcggagcgtccagacagagcagaagttgcgcgggcaggttgggcggtgccggccgcaaattgttgccatgacaacgacgtggaccaaacctgctgctgaagatgcaaagtcctccagcgccgcaaaacttgtaggctcgaaaacgatattgttcgcaaataaaacactgcccccgtcaatatcctcgcgtacggctgggctcatcgctctgaggtcggcctcgtgaatcgtgaccttggataaattcgggaaatccacgcgtgcgccacgaatcagcagttttgacatgtttgccaagttgtcctggaactcaatcccgatgcatctcccaacacaagtctccaatgccacttgtgcaaccacgttgccgatcccagatccaaagtcaacaaaaatttcggcgattgtaagcgttggaatgactgccagtattgctgaaaccccagttggcgaaatctcaccagcatgacaatccggcgcatggacgggttgacgcaaggccgaggcatacaaacttgacacagcgtcatgaacgttgccaacattatcgggagcgctcaacttgtggccaccactaagcgcgtccgtgccgatttttgatcccgaaatctccttgggaaagaatctaagctcacgccgtgtgtcctcttcagcgtctttagacgaatctgcagctgtcgctgtgtcttcccgcagtatggcatccccaaccagacagtccgccagttaattcggcggcctgcatcaacctgctcctttgccagccgataaagcagcaagtcctcttcgtccgagaagtctgccatcgggttgccacgagatctagaaatctatactgccatacataccataagatatttggtctcatacttcttcgcctaataacctaccgacctttcacaaaggtcccatccccatcaatgtactcaacaccaggttcaagacgctcctaccgccagcaaggcaactaagcccggctatcgatgccgctgctataaacgctctcgtggcgctgcccagccaacacgaaagcacccctattagcctcatcgaccgcgccgaatgccaccgtcacgttcgtgaccatgccagcggagacgcccccgatcacgtccaacacggccacggtcgccgcggaagcctccgagaccatgctgttgacggcacacacggcggcgctgcggccgccgttgtgcttgctgcccgagtcccccgccaccatcgcatccgtgtcgccgacggcggagacgcttccgaccaggtccatcgcgaccatgattgggggaatgccgatggtagggcgtttcggcgagggagaacgggtagagcggtcgcgatacataatgtcacataaataggctattggtatttgaagtggtttacacaacatgtaaaggctcgcctttttggtgcccattttgctttggttcatcttttcgagctttcccgcgctgacattttttttcatgtcttcgctttgaccaatcaaaacctttctccgaaaattcgatgacagtgattggctgccaaagttcaacaagaagcgtgattggtggaattagttcaaatcgatccactgttgtttggtcggcttgctcggcttgctccgaatcaaaatgaccttctcgcatcggagctcatttccgattttgcaagctcgatcccagtgtccctggctgaccacgctccgttcttccggtttccacgcctcgaacgacggtggtacacatgtgctggccgtacccatcgtttacggcgcgtggctgcccgtgatactatgcacgctgcggtcaagtccagcctgccagttcgcccctcactctccaagtccagcgtcgttggagtcgccacacgctcagctcctgtgtgtcgacgcatctgctgctgctgaccgcctgtgctacttgacgcgctgacctcgggacgcaccgggcatgaagttggactcgctgtctgtcgtgtacccacccgacgaccacgtcccgcacaaccgccgcaacagcgcatttgttgtcggggatcctcagagtcgacnnnnnnnnnnnnnnnnnnnnnnnnnnnnnnnnnnnnnnnnnnnnnnnnnnnnnnnnnnnnnnnnnnnnnnnnnnnnnnnnnnnnnnnnnnnnnnnnnnnnnnnnnnnnnnnnnnnnnnnnnnnnnnnnnnnnnnnnnnnnnnnnnnnnnnnnnnnnnnnnnnnnnnnnnnnnnnnnnnnnnnnnnnnnnnnnnnnnnnnnnnnnnnnnnnnnnnnnnnnnnnnnnnnnnnnnnnnnnnnnnnnnnnnnnnnnnnnnnnnnnnnnnnnnnnnnnnnnnnnnnnnnnnnnnnnnnnnnnnnnnnnnnnnnnnnnnnnnnnnnnnnnnnnnnnnnnnnnnnnnnnnnnnnnnnnnnnnnnnnnnnnnnnnnnnnnnnnnnnnnnnnnnnnnnnnnnnnnnnnnnnnnnnnnnnnnnnnnnnnnnnnngctttcccgcgctgacatttttttccatgtcttcgctttgaccaatcaagacctgtctccgaaaaatcgatgacagtgattggctgccaaagttcaacaagaagtgtgattggtggaattagttcaaatcgatccactgttgtttggtcggcttgctcggcttgctccgaatcaaaatgaccttctcgcatcggagctcatttccgattttgcaagctcgatcccaagtgtccctggctgaccacgctccgttcttccggtttccacgcctcgaacgacggtggtacacatgtgctggccgtacccatcgtttacggcgcgtggctgcccgtgatactatgcacgctgcggtcaagtccagcctgccagttcgcccctcactctccaagtccagcgtcgttggagtcgccacacgctcagctcctgtgtgtcgacgcatctgctgctgctgaccgcctgtgctacttgacgcgctgacctcgggacgcaccgggcatgaagttggactcgctgtccgtcgtgtaccaacccgacgaccacgtcccgcacaaccgccgcaacagcgcatttgttgtcgataacgcagtgctactagaactggcgctgggatggtgtcgtttgtcccgtagtccccaactctcctcacggcattgccgccgggtgtggctgtcaaccacgttcagctgcgagacgccgagattccgctacaggaccccgagatggagcgtcggaggcggcactggacgactgcccactagacctgcaggtggacggcgttctcccgccctttttcgcttccagcgatcctcatcgacggacaaccgcacgtagatgcctcaggagggagcggggtgccaccggcgacaaagatcaagagaggctaccgctagaaatggagcgttcgagtcccatcgggggtcaagatggagcctgaagtcgccatgacgacgacgtcgcaagcgcccaatttgcccagcgacagggacacgcaggcggcattggcacttggcagcagtgtatctacgatgggcgtcaccactgtcgccgtgtaccgtagttcggaccgtcactatggggcttgcatgggtcaacgtaactgtggagacgatgccgaagccgctacagcacttacatttggtagcaatactggagtaaatctaagtaccgtatgttaccgttgaacgctttgagtactcgtactattcatgactctgtgtaattacactgtattcatcccgcactcgatatccgatgcattttgcacggtaccttgtcagcacagctacgctgcattccgcatggcgggcattgaacctgcaccggtgggttcaaactccaccatactaacatcacatacaacgatgagtcgaaccaccccatacaaagcctagtacgttcggtccctttgaacacttcgaacatggccatacaaataacaatatattcggtccaatggctcaagcgagaccgatgcatgcaaaccagttagagatctttgccgtgaaggagccactggtacgctagctgagctcgtccaccaccacatacccaatgccacgaaagcggaagcagcggtcgagcacctgcgagcccacagctaagcgacaacaatcacgacgctcgggtcgtatctcaccttcagctcccaccggtctaggtacgatccgttgcttacctagcgctcgagcaaggtatcatattgacgcgtgtccaccggcatacagacctcgcggatgaccatgcgatgtttggatctgtttggcgagttctaagtgcggctggttggaattcaaagcgtccaacagggcgaagcttgagtgatctgtaccgctatatccctcccggtgatgactcgaatggaacagagggtatcgactattttctgggtgaacgagcgcttttggagcacctatcggcggacattggtagtggaggatggtgatacggatggtgccctgtccaagcgacccgatgaggaaattgatgtcgcccaaaccaacgtttaatatatttgggcctggcgatgttggtctcacgcggcagatgatgtacgtgtagtagcgcgggagttcctggagcgagtgcaaacgacgttgattgtgagaaagccgcgcttccgggagtaagctgtcacgaatcggtgtttgatggtgctgccagcacctctcaggattatgatggtgctgcatctgctgtatctacaccgccaacatcagcgcgcgtcgtacccgtacatgcagcagctacgcgagaccatttactccagctagatcaccacgcacccaccgcatcgtctggtacatgtgcgcaatgtgcagtctgcaatatggagtgttcaaccgagcgcagttgtacctggtgcaaaaaatttctccatcacttctgctctcatgatgtctgcgtttcgttgaatatcccagaccctaatggtggattcgccaaggattttggtgatagcagctattgcagcacgctttgctacacaaacgctacaaaaatgaacttggtggaccaagggagaagtgatgaacgacccaatgccctacttgacctccccgcgagtgttttgacgccaagtgtggctccgtcggaacctgcagagaccaacgccgccacacatcctgctacaaattgctcgggggcagcaaaacctaagcgaaaaaagcgcggtcctgccgaacaatcagctccaaaggcaccccgaagcgaaaaccaagctgcgcaacggaaaacgaaaagcaagaaggcacctaccaaggccagtaaacccaaggctgtggcaatgaaagaagatttgattcgccgagcacatgnnnnnnnnnnnnnnnnnnnnnnnnnnnnnnnnnnnnnnnnnnnnnnnnnnnnnnnnnnnnnnnnnnnnnnnnnnnnnnnnnnnnnnnnnnnnnnnnnnnnnnnnnnnnnnnnnnnnnnnnnnnnnnnnnnnnnnnnnnnnnnnnnnnnnnnnnnnnnnnnnnnnnnnnnnnnnnnnnnnnnnnnnnnnnnnnnnnnnnnnnnnnnnnnnnnnnnnnnnnnnnnnnnnnnnnnnnnnnnnnnnnnnnnnnnnnnnnnnnnnnnnnnnnnnnnnnnnnnnnnnnnnnnnnnnnnnnnnnnnnnnnnnnnnnnnnnnnnnnnnnnnnnnnnnnnnnnnnnnnnnnnnnnnnnnnnnnnnnnnnnnnnnnnnnnnnnnnnnnnnnnnnnnnnnnnnnnnnnnnnnnnnnnnnnnnnnnnnnnnnnnnnnnnnnnnnnnnnnnnnnnnnnnnnnnnnnnnnnnnnnnnnnnnnnnnnnnnnnnnnnnnnnnnnnnnnnnnnnnnnnnnnnnnnnnnnnnnnnnnnnnnnnnnnnnnnnnnnnnnnnnnnnnnnnnnnnnnnnnnnnnnnnnnnnnnnnnnnngttcaatggacgtgtactgcttttcaaataaaagatcacgttcaccatgtttccgaagccatcatcacccgtggtatccgccagtttgccaacatggaaaaagacaaacttcaatttggagagtcttggacgtccctgtgcaacatggtccccaaactatcaaacattcctgcactgacagatgaatttgaggagatggacgagcgtggttatcgtgagtggtttgcgtttcgcgggcggaaagaattgcagcgccctttgtgccctggtgaagtcgaagagatagcgtcaatgacattttcacccacagcatcgcttggccaaccgtcagggctatttacacatccggatgggatcctctggtacatgactctgttcgacaagggtgagatgagaaattactgggtggacgacgaggaagcaactattttttcctggagcgcgtactactagtttgaagtcaattatgacatggcgaagattcctgtacatccgtaagaatttgagttttcgttccaaggtgtctacctccgacatcaagcgcggtcctgtagctagaatacgaccactcatgagcattctgaaatcgcgatgcctgcgccatgttgaagtcggtcgaaacgtggctgttgatgaggccacaattgcctgccgatcccagtacgcccgccacattatagtcttcaacccacaaaaacctaccggaaagtatcatttcaagttatacgtgtgttgctgttctaccttgtggtacgcggtgagtttcaagttgcactgctccagtgaacttgatgatcggctggacggtgtaatttcacgctcagaagtgcagaaattcgctgatctaaccgcgaagtcgtctgaaatccgctctcacgtcatggcggttacttcatctttgaaaggatccagtcgcattgtaaacacggacaacttctacacttcctgtttgctgttgaagactttacgatcgattggtctctatggtcgtggcactgtacgcacatctagcaagcatttccctcattttacgatgattcttaaggaggacgcgaagccgcgaggctacatgaagcaaggtgtatgcttagagaagcatattgtcgcagctagttgggtggatggctcaattgtcaatgtcgtgtctaatgccgatgcttcgaccacatcaactgtgcatcgtcgtataaatgaatcgggtgtggctttcactgctcctacttgcgtcggcgagtataattcagcgatgcaaggtgttgatcggctcgaccaactgcgtgcacgattttctctagccgatggccactcatttcagaagtggcataaaaaactagcgatggtcatgcttgatatagccaggtgcaatgcctacatttgcgatagtttggcgcgtggtgagagcgaggagtctcgttcgacgggaggtacagcccaaacgaggtcaagggcccgcgatagtcatcgcgcatttgtggcatcactggttcgagaactgttcaatggggactggaagaaatctctggatagggaacatggaatgatgtatgctgcaaagccgacaacgacaacaatgccgatgacgacccaannnnnnnnnnnnnnnnnnnnnnnnnnnnnnnnnnnnnnnnnnnnnnnnnnnnnnnnnnnnnnnnnnnnnnnnnnnnnnnnnnnnnnnnnnnnnnnnnnnnnnnnnnnnnnnnnnnnnnnnnnnnnnnnnnnnnnnnnnnnnnnnnnnnnnnnnnnnnnnnnnnnnnnnnnnnnnnnnnnnnnnnnnnnnnnnnnnnnnnnnnnnnnnnnnnnnnnnnnnnnnnnnnnnnnnnnnnnnnnnnnnnnnnnnnnnnnnnnnnnnnnnnnnnnnnnnnnnnnnnnnnnnnnnnnnnnnnnnnnnnnnnnnnnnnnnnnnnnnnnnnnnnnnnnnnnnnnnnnnnnnnnnnnnnnnnnnnnnnnnnnnnnnnnnnnnnnnnnnnnnnnnnnnnnnnnnnnnnnnnnnnnnnnnnnnnnnnnnnnnnnnnnnnnnnnnnnnnnnnnnnnnnnnnnnnnnnnnnnnnnnnnnnnnnnnnnnnnnnnnnnnnnnnnnnnnnnnnnnnnnnnnnnnnnnnnnnnnnnnnnnnnnnnnnnnnnnnnnnnnnnnnnnnnnnnnnnnnnnnnnnnnnnnnnnnnnnnnnnnnnnnnnnnnnnnnnnnnnnnnnnnnnnnnnnnnnnnnnnnnnnnnnnnnnnnnnnnnnnnnnnnnnnnnnnnnnnnnnnnnnnnnnnnnnnnnnnnnnnnnnnnnnnnnnnnnnnnnnnnnnnnnnnnnnnnnnnnnnnnnnnnnnnnnnnnnnnnnnnnnnnnnnnnnnnnnnnnnnnnnnnnnnnnnnnnnnnnnnnnnnnnnnnnnnnnnnnnnnnnnnnnnnnnnnnnnnnnnnnnnnnnnnnnnnnnnnnnnnnnnnnnnnnnnnnnnnnnnnnnnnnnnnnnnnnnnnnnnnnnnnnnnnnnnnnnnnnnnnnnnnnnnnnnnnnnnnnnnnnnnnnnnnnnnnnnnnnnnnnnnnnnnnnnnnnnnnnnnnnnnnnnnnnnnnnnnnnnnnnnnnnnnnnnnnnnnnnnnnnnnnnnnnnnnnnnnnnnnnnnnnnnnnnnnnnnnnnnnnnnnnnnnnnnnnnnnnnnnnnnnnnnnnnnnnnnnnnnnnnnnnnnnnnnnnnnnnnnnnnnnnnnnnnnnnnnnnnnnnnnnnnnnnnnnnnnnnnnnnnnnnnnnnnnnnnnnnnnnnnnnnnnnnnnnnnnnnnnnnnnnnnnnnnnnnnnnnnnnnnnnnnnnnnnnnnnnnnnnnnnnnnnnnnnnnnnnnnnnnnnnnnnnnnnnnnnnnnnnnnnnnnnnnnnnnnnnnnnnnnnnnnnnnnnnnnnnnnnnnnnnnnnnnnnnnnnnnnnnnnnnnnnnnnnnnnnnnnnnnnnnnnnnnnnnnnnnnnnnnnnnnnnnnnnnnnnnnnnnnnnnnnnnnnnnnnnnnnnnnnnnnnnnnnnnnnnnnnnnnnnnnnnnnnnnnnnnnnnnnnnnnnnnnnnnnnnnnnnnnnnnnnnnnnnnnnnnnnnnnnnnnnnnnnnnnnnnnnnnnnnnnnnnnnnnnnnnnnnnnnnnnnnnnnnnnnnnnnnnnnnnnnnnnnnnnnnnnnnnnnnnnnnnnnnnnnnnnnnnnnnnnnnnnnnnnnnnnnnnnnnnnnnnnnnnnnnnnnnnnnnnnnnnnnnnnnnnnnnnnnnnnnnnnnnnnnnnnnnnnnnnnnnnnnnnnnnnnnnnnnnnnnnnnnnnnnnnnnnnnnnnnnnnnnnnnnnnnnnnnnnnnnnnnnnnnnnnnnnnnnnnnnnnnnnnnnnnnnnnnnnnnnnnnnnnnnnnnnnnnnnnnnnnnnnnnnnnnnnnnnnnnnnnnnnnnnnnnnnnnnnnnnnnnnnnnnnnnnnnnnnnnnnnnnnnnnnnnnnnnnnnnnnnnnnnnnnnnnnnnnnnnnnnnnnnnnnnnnnnnnnnnnnnnnnnnnnnnnnnnnnnnnnnnnnnnnnnnnnnnnnnnnnnnnnnnnnnnnnnnnnnnnnnnnnnnnnnnnnnnnnnnnnnnnnnnnnnnnnnnnnnnnnnnnnnnnnnnnnnnnnnnnnnnnnnnnnnnnnnnnnnnnnnnnnnnnnnnnnnnnnnnnnnnnnnnnnnnnnnnnnnnnnnnnnnnnnnnnnnnnnnnnnnnnnnnnnnnnnnnnnnnnnnnnnnnnnnnnnnnnnnnnnnnnnnnnnnnnnnnnnnnnnnnnnnnnnnnnnnnnnnnnnnnnnnnnnnnnnnnnnnnnnnnnnnnnnnnnnnnnnnnnnnnnnnnnnnnnnnnnnnnnnnnnnnnnnnnnnnnnnnnnnnnnnnnnnnnnnnnnnnnnnnnnnnnnnnnnnnnnnnnnnnnnnnnnnnnnnnnnnnnnnnnnnnnnnnnnnnnnnnnnnnnnnnnnnnnnnnnnnnnnnnnnnnnnnnnnnnnnnnnnnnnnnnnnnnnnnnnnnnnnnnnnnnnnnnnnnnnnnnnnnnnnnnnnnnnnnnnnnnnnnnnnnnnnnnnnnnnnnnnnnnnnnnnnnnnnnnnnnnnnnnnnnnnnnnnnnnnnnnnnnnnnnnnnnnnnnnnnnnnnnnnnnnnnnnnnnnnnnnnnnnnnnnnnnnnnnnnnnnnnnnnnnnnnnnnnnnnnnnnnnnnnnnnnnnnnnnnnnnnnnnnnnnnnnnnnnnnnnnnnnnnnnnnnnnnnnnnnnnnnnnnnnnnnnnnnnnnnnnnnnnnnnnnnnnnnnnnnnnnnnnnnnnnnnnnnnnnnnnnnnnnnnnnnnnnnnnnnnnnnnnnnnnnnnnnnnnnnnnnnnnnnnnnnnnnnnnnnnnnnnnnnnnnnnnnnnnnnnnnnnnnnnnnnnnnnnnnnnnnnnnnnnnnnnnnnnnnnnnnnnnnnnnnnnnnnnnnnnnnnnnnnnnnnnnnnnnnnnnnnnnnnnnnnnnnnnnnnnnnnnnnnnnnnnnnnnnnnnnnnnnnnnnnnnnnnnnnnnnnnnnnnnnnnnnnnnnnnnnnnnnnnnnnnnnnnnnnnnnnnnnnnnnnnnnnnnnnnnnnnnnnnnnnnnnnnnnnnnnnnnnnnnnnnnnnnnnnnnnnnnnnnnnnnnnnnnnnnnnnnnnnnnnnnnnnnnnnnnnnnnnnnnnnnnnnnnnnnnnnnnnnnnnnnnnnnnnnnnnnnnnnnnnnnnnnnnnnnnnnnnnnnnnnnnnnnnnnnnnnnnnnnnnnnnnnnnnnnnnnnnnnnnnnnnnnnnnnnnnnnnnnnnnnnnnnnnnnnnnnnnnnnnnnnnnnnnnnnnnnnnnnnnnnnnnnnnnnnnnnnnnnnnnnnnnnnnnnnnnnnnnnnnnnnnnnnnnnnnnnnnnnnnnnnnnnnnnnnnnnnnnnnnnnnnnnnnnnnnnnnnnnnnnnnnnnnnnnnnnnnnnnnnnnnnnnnnnnnnnnnnnnnnnnnnnnnnnnnnnnnnnnnnnnnnnnnnnnnnnnnnnnnnnnnnnnnnnnnnnnnnnnnnnnnnnnnnnnnnnnnnnnnnnnnnnnnnnnnnnnnnnnnnnnnnnnnnnnnnnnnnnnnnnnnnnnnnnnnnnnnnnnnnnnnnnnnnnnnnnnnnnnnnnnnnnnnnnnnnnnnnnnnnnnnnnnnnnnnnnnnnnnnnnnnnnnnnnnnnnnnnnnnnnnnnnnnnnnnnnnnnnnnnnnnnnnnnnnnnnnnnnnnnnnnnnnnnnnnnnnnnnnnnnnnnnnnnnnnnnnnnnnnnnnnnnnnnnnnnnnnnnnnnnnnnnnnnnnnnnnnnnnnnnnnnnnnnnnnnnnnnnnnnnnnnnnnnnnnnnnnnnnnnnnnnnnnnnnnnnnnnnnnnnnnnnnnnnnnnnnnnnnnnnnnnnnnnnnnnnnnnnnnnnnnnnnnnnnnnnnnnnnnnnnnnnnnnnnnnnnnnnnnnnnnnnnnnnnnnnnnnnnnnnnnnnnnnnnnnnnnnnnnnnnnnnnnnnnnnnnnnnnnnnnnnnnnnnnnnnnnnnnnnnnnnnnnnnnnnnnnnnnnnnnnnnnnnnnnnnnnnnnnnnnnnnnnnnnnnnnnnnnnnnnnnnnnnnnnnnnnnnnnnnnnnnnnnnnnnnnnnnnnnnnnnnnnnnnnnnnnnnnnnnnnnnnnnnnnnnnnnnnnnnnnnnnnnnnnnnnnnnnnnnnnnnnnnnnnnnnnnnnnnnnnnnnnnnnnnnnnnnnnnnnnnnnnnnnnnnnnnnnnnnnnnnnnnnnnnnnnnnnnnnnnnnnnnnnnnnnnnnnnnnnnnnnnnnnnnnnnnnnnnnnnnnnnnnnnnnnnnnnnnnnnnnnnnnnnnnnnnnnnnnnnnnnnnnnnnnnnnnnnnnnnnnnnnnnnnnnnnnnnnnnnnnnnnnnnnnnnnnnnnnnnnnnnnnnnnnnnnnnnnnnnnnnnnnnnnnnnnnnnnnnnnnnnnnnnnnnnnnnnnnnnnnnnnnnnnnnnnnnnnnnnnnnnnnnnnnnnnnnnnnnnnnnnnnnnnnnnnnnnnnnnnnnnnnnnnnnnnnnnnnnnnnnnnnnnnnnnnnnnnnnnnnnnnnnnnnnnnnnnnnnnnnnnnnnnnnnnnnnnnnnnnnnnnnnnnnnnnnnnnnnnnnnnnnnnnnnnnnnnnnnnnnnnnnnnnnnnnnnnnnnnnnnnnnnnnnnnnnnnnnnnnnnnnnnnnnnnnnnnnnnnnnnnnnnnnnnnnnnnnnnnnnnnnnnnnnnnnnnnnnnnnnnnnnnnnnnnnnnnnnnnnnnnnnnnnnnnnnnnnnnnnnnnnnnnnnnnnnnnnnnnnnnnnnnnnnnnnnnnnnnnnnnnnnnnnnnnnnnnnnnnnnnnnnnnnnnnnnnnnnnnnnnnnnnnnnnnnnnnnnnnnnnnnnnnnnnnnnnnnnnnnnnnnnnnnnnnnnnnnnnnnnnnnnnnnnnnnnnnnnnnnnnnnnnnnnnnnnnnnnnnnnnnnnnnnnnnnnnnnnnnnnnnnnnnnnnnnnnnnnnnnnnnnnnnnnnnnnnnnnnnnnnnnnnnnnnnnnnnnnnnnnnnnnnnnnnnnnnnnnnnnnnnnnnnnnnnnnnnnnnnnnnnnnnnnnnnnnnnnnnnnnnnnnnnnnnnnnnnnnnnnnnnnnnnnnnnnnnnnnnnnnnnnnnnnnnnnnnnnnnnnnnnnnnnnnnnnnnnnnnnnnnnnnnnnnnnnnnnnnnnnnnnnnnnnnnnnnnnnnnnnnnnnnnnnnnnnnnnnnnnnnnnnnnnnnnnnnnnnnnnnnnnnnnnnnnnnnnnnnnnnnnnnnnnnnnnnnnnnnnnnnnnnnnnnnnnnnnnnnnnnnnnnnnnnnnnnnnnnnnnnnnnnnnnnnnnnnnnnnnnnnnnnnnnnnnnnnnnnnnnnnnnnnnnnnnnnnnnnnnnnnnnnnnnnnnnnnnnnnnnnnnnnnnnnnnnnnnnnnnnnnnnnnnnnnnnnnnnnnnnnnnnnnnnnnnnnnnnnnnnnnnnnnnnnnnnnnnnnnnnnnnnnnnnnnnnnnnnnnnnnnnnnnnnnnnnnnnnnnnnnnnnnnnnnnnnnnnnnnnnnnnnnnnnnnnnnnnnnnnnnnnnnnnnnnnnnnnnnnnnnnnnnnnnnnnnnnnnnnnnnnnnnnnnnnnnnnnnngagacacgcgtgtatgcccgtatgcttctctgatcttcacccgtatcaatccatgtatccggttctgggaggcctcgagtaggagtgtggctttgttgggatagttgtccagcatccacgcaacgaaaagatttttctttggcgatgcgtctgctccaagcttcccgctcatctgagcaaagacactgtcgtccacgaacgcggccaaagcctggggatccaactggctggacatgtccatctgcagcagcacagcagtacacagtcagcaatgcggcagtagtatcatgacgacgttggcaagggcgcgggcatgcctgctagtcccggtgggcggtggcgctacaggacaaggcttggaggggaaatgtggaaatggccggttggatttttcttccctcagttttgtaccagaaacacggtaccgcatctacgtgatatacagtgcgcgccgaaattataaccgcaccccaaaaattatttttttaaaccaatgattgtgctttcggcgccaaaccgctgcttatgattcgtctaaaatcgatagaaaacagatgcaacaatcagaatcgaaaaagctgtaaccgtttttttgcaatggacgaaaaaccgactttgggtcgggtcaaaattatagccgcacccggtaagctatcggtaagattggtaacaaactcgtggagagctgtttcaagcgtaataaatgaactaactccattgaacagctcgaataacgcctaccggtacagtaaagtgcgtcgataaggaacgcctgatatacattgaaagaaaaaggtatattgataattaaaggtttgactcgtcacatgcagacagcaaatgcactgatttactgcactatgtagttcatgtcggacttcgcgaccagagtctcggcttgagcccacgcagccaactcagcataggtagcacccggtagatcacgacggcgatgacagattagcagcgactgaagcttggtcagacgtagccggctctcgaacggtctggaagtggcggtcaccatgggagttgtgagcagcagagcgaaagttggttaatgaggcatgcagacatgtacctggcgcgattcccgcgctcacagcgatcctcatgctcatgattccctctcgcgacctttaggttccatttccccgacttgggagccgctccatccagccgctcttgaggctcggtttcggaactgtgattggcggaatgttaaacgggaccgaatgattggtagaatcatataactaattcagtacaattggcacacaatgggtacaagcgaggattcatgtcttgtcgtagaatataaaatgtcgcccgttccttatcgacgcacttcactgtagtaagctgctcaaataaggttaagctgacgcggttgataagattcaatggagacaagcactatcttgaatttgtatagaagagtggtgtttgacagtgtggagaggtctatactcgaagttgaggctgtcagctgactagtgtcttcattggcgtggtagcgatgctgggcttgctcagttcagcaacatgtaccagaaaactcgatcgatttttttccgggtcaatacaaatcctttatacttgatgtttgtattggaaagcaccgccaaacccagtcacaaatttcaatcaagtctagtcccgtacagtgcgtagtttggtaaatacatggctacgtatcaaaagtagagtatttcttcctgaaaataatgcccgagttgcttccagaatcctcctagtgttgtctcggaagtccggccaagttgccaccaagtgtttagtgcgcttnnnnnnnnnnnnnnnnnnnnnnnnnnnnnnnnnnnnnnnnnnnnnnnnnnnnnnnnnnnnnnnnnnnnnnnnnnnnnnnnnnnnnnnnnnnnnnnnnnnnnnnnnnnnnnnnnnnnnnnnnnnnnnnnnnnnnnnnnnnnnnnnnnnnnnnnnnnnnnnnnnnnnnnnnnnnnnnnnnnnnnnnnnnnnnnnnnnnnnnnnnnnnnnnnnnnnnnnnnnnnnnnnnnnnnnnnnnnnnnnnnnnnnnnnnnnnnnnnnnnnnnnnnnnnnnnnnnnnnnnnnnnnnnnnnnnnnnnnnnnnnnnnnnnnnnnnnnnnnnnnnnnnnnnnnnnnnnnnnnnnnnnnnnnnnnnnnnnnnnnnnnnnnnnnnnnnnnnnnnnnnnnnnnnnnnnnnnnnnnnnnnnnnnnnnnnnnnnnnnnnnnnnnnnnnnnnnnnnnnnnnnnnnnnnnnnnnnnnnnnnnnnnnnnnnnnnnnnnnnnnnnnnnnnnnnnnnnnnnnnnnnnnnnnnnnnnnnnnnnnnnnnnnnnnnnnnnnnnnnnnnnnnnnnnnnnnnnnnnnnnnnnnnnnnnnnnnnnnnnnnnnnnnnnnnnnnnnnnnnnnnnnnnnnnnnnnnnnnnnnnnnnnnnnnnnnnnnnnnnnnnnnnnnnnnnnnnnnnnnnnnnnnnnnnnnnnnnnnnnnnnnnnnnnnnnnnnnnnnnnnnnnnnnnnnnnnnnnnnnnnnnnnnnnnnnnnnnnnnnnnnnnnnnnnnnnnnnnnnnnnnnnnnnnnnnnnnnnnnnnnnnnnnnnnnnnnnnnnnnnnnnnnnnnnnnnnnnnnnnnnnnnnnnnnnnnnnnnnnnnnnnnnnnnnnnnnnnnnnnnnnnnnnnnnnnnnnnnnnnnnnnnnnnnnnnnnnnnnnnnnnnnnnnnnnnnnnnnnnnnnnnnnnnnnnnnnnnnnnnnnnnnnnnnnnnnnnnnnnnnnnnnnnnnnnnnnnnnnnnnnnnnnnnnnnnnnnnnnnnnnnnnnnnnnnnnnnnnnnnnnnnnnnnnnnnnnnnnnnnnnnnnnnnnnnnnnnnnnnnnnnnnnnnnnnnnnnnnnnnnnnnnnnnnnnnnnnnnnnnnnnnnnnnnnnnnnnnnnnnnnnnnnnnnnnnnnnnnnnnnnnnnnnnnnnnnnnnnnnnnnnnnnnnnnnnnnnnnnnnnnnnnnnnnnnnnnnnnnnnnnnnnnnnnnnnnnnnnnnnnnnnnnnnnnnnnnnnnnnnnnnnnnnnnnnnnnnnnnnnnnnnnnnnnnnnnnnnnnnnnnnnnnnnnnnnnnnnnnnnnnnnnnnnnnnnnnnnnnnnnnnnnnnnnnnnnnnnnnnnnnnnnnnnnnnnnnnnnnnnnnnnnnnnnnnnnnnnnnnnnnnnnnnnnnnnnnnnnnnnnnnnnnnnnnnnnnnnnnnnnnnnnnnnnnnnnnnnnnnnnnnnnnnnnnnnnnnnnnnnnnnnnnnnnnnnnnnnnnnnnnnnnnnnnnnnnnnnnnnnnnnnnnnnnnnnnnnnnnnnnnnnnnnnnnnnnnnnnnnnnnnnnnnnnnnnnnnnnnnnnnnnnnnnnnnnnnnnnnnnnnnnnnnnnnnnnnnnnnnnnnnnnnnnnnnnnnnnnnnnnnnnnnnnnnnnnnnnnnnnnnnnnnnnnnnnnnnnnnnnnnnnnnnnnnnnnnnnnnnnnnnnnnnnnnnnnnnnnnnnnnnnnnnnnnnnnnnnnnnnnnnnnnnnnnnnnnnnnnnnnnnnnnnnnnnnnnnnnnnnnnnnnnnnnnnnnnnnnnnnnnnnnnnnnnnnnnnnnnnnnnnnnnnnnnnnnnnnnnnnnnnnnnnnnnnnnnnnnnnnnnnnnnnnnnnnnnnnnnnnnnnnnnnnnnnnnnnnnnnnnnnnnnnnnnnnnnnnnnnnnnnnnnnnnnnnnnnnnnnnnnnnnnnnnnnnnnnnnnnnnnnnnnnnnnnnnnnnnnnnnnnnnnnnnnnnnnnnnnnnnnnnnnnnnnnnnnnnnnnnnnnnnnnnnnnnnnnnnnnnnnnnnnnnnnnnnnnnnnnnnnnnnnnnnnnnnnnnnnnnnnnnnnnnnnnnnnnnnnnnnnnnnnnnnnnnnnnnnnnnnnnnnnnnnnnnnnnnnnnnnnnnnnnnnnnnnnnnnnnnnnnnnnnnnnnnnnnnnnnnnnnnnnnnnnnnnnnnnnnnnnnnnnnnnnnnnnnnnnnnnnnnnnnnnnnnnnnnnnnnnnnnnnnnnnnnnnnnnnnnnnnnnnnnnnnnnnnnnnnnnnnnnnnnnnnnnnnnnnnnnnnnnnnnnnnnnnnnnnnnnnnnnnnnnnnnnnnnnnnnnnnnnnnnnnnnnnnnnnnnnnnnnnnnnnnnnnnnnnnnnnnnnnnnnnnnnnnnnnnnnnnnnnnnnnnnnnnnnnnnnnnnnnnnnnnnnnnnnnnnnnnnnnnnnnnnnnnnnnnnnnnnnnnnnnnnnnnnnnnnnnnnnnnnnnnnnnnnnnnnnnnnnnnnnnnnnnnnnnnnnnnnnnnnnnnnnnnnnnnnnnnnnnnnnnnnnnnnnnnnnnnnnnnnnnnnnnnnnnnnnnnnnnnnnnnnnnnnnnnnnnnnnnnnnnnnnnnnnnnnnnnnnnnnnnnnnnnnnnnnnnnnnnnnnnnnnnnnnnnnnnnnnnnnnnnnnnnnnnnnnnnnnnnnnnnnnnnnnnnnnnnnnnnnnnnnnnnnnnnnnnnnnnnnnnnnnnnnnnnnnnnnnnnnnnnnnnnnnnnnnnnnnnnnnnnnnnnnnnnnnnnnnnnnnnnnnnnnnnnnnnnnnnnnnnnnnnnnnnnnnnnnnnnnnnnnnnnnnnnnnnnnnnnnnnnnnnnnnnnnnnnnnnnnnnnnnnnnnnnnnnnnnnnnnnnnnnnnnnnnnnnnnnnnnnnnnnnnnnnnnnnnnnnnnnnnnnnnnnnnnnnnnnnnnnnnnnnnnnnnnnnnnnnnnnnnnnnnnnnnnnnnnnnnnnnnnnnnnnnnnnnnnnnnnnnnnnnnnnnnnnnnnnnnnnnnnnnnnnnnnnnnnnnnnnnnnnnnnnnnnnnnnnnnnnnnnnnnnnnnnnnnnnnnnnnnnnnnnnnnnnnnnnnnnnnnnnnnnnnnnnnnnnnnnnnnnnnnnnnnnnnnnnnnnnnnnnnnnnnnnnnnnnnnnnnnnnnnnnnnnnnnnnnnnnnnnnnnnnnnnnnnnnnnnnnnnnnnnnnnnnnnnnnnnnnnnnnnnnnnnnnnnnnnnnnnnnnnnnnnnnnnnnnnnnnnnnnnnnnnnnnnnnnnnnnnnnnnnnnnnnnnnnnnnnnnnnnnnnnnnnnnnnnnnnnnnnnnnnnnnnnnnnnnnnnnnnnnnnnnnnnnnnnnnnnnnnnnnnnnnnnnnnnnnnnnnnnnnnnnnnnnnnnnnnnnnnnnnnnnnnnnnnnnnnnnnnnnnnnnnnnnnnnnnnnnnnnnnnnnnnnnnnnnnnnnnnnnnnnnnnnnnnnnnnnnnnnnnnnnnnnnnnnnnnnnnnnnnnnnnnnnnnnnnnnnnnnnnnnnnnnnnnnnnnnnnnnnnnnnnnnnnnnnnnnnnnnnnnnnnnnnnnnnnnnnnnnnnnnnnnnnnnnnnnnnnnnnnnnnnnnnnnnnnnnnnnnnnnnnnnnnnnnnnnnnnnnnnnnnnnnnnnnnnnnnnnnnnnnnnnnnnnnnnnnnnnnnnnnnnnnnnnnnnnnnnnnnnnnnnnnnnnnnnnnnnnnnnnnnnnnnnnnnnnnnnnnnnnnnnnnnnnnnnnnnnnnnnnnnnnnnnnnnnnnnnnnnnnnnnnnnnnnnnnnnnnnnnnnnnnnnnnnnnnnnnnnnnnnnnnnnnnnnnnnnnnnnnnnnnnnnnnnnnnnnnnnnnnnnnnnnnnnnnnnnnnnnnnnnnnnnnnnnnnnnnnnnnnnnnnnnnnnnnnnnnnnnnnnnnnnnnnnnnnnnnnnnnnnnnnnnnnnnnnnnnnnnnnnnnnnnnnnnnnnnnnnnnnnnnnnnnnnnnnnnnnnnnnnnnnnnnnnnnnnnnnnnnnnnnnnnnnnnnnnnnnnnnnnnnnnnnnnnnnnnnnnnnnnnnnnnnnnnnnnnnnnnnnnnnnnnnnnnnnnnnnnnnnnnnnnnnnnnnnnnnnnnnnnnnnnnnnnnnnnnnnnnnnnnnnnnnnnnnnnnnnnnnnnnnnnnnnnnnnnnnnnnnnnnnnnnnnnnnnnnnnnnnnnnnnnnnnnnnnnnnnnnnnnnnnnnnnnnnnnnnnnnnnnnnnnnnnnnnnnnnnnnnnnnnnnnnnnnnnnnnnnnnnnnnnnnnnnnnnnnnnnnnnnnnnnnnnnnnnnnnnnnnnnttacctatggtatgtaccgcatcgccgaagttagtgttcgcacatttattaataccataaagcgcactaaacacttggtggcaacttggccggacttccgagacaacactaggaggattctggaagcaaaactcgggcattattttcaagaagaaatactctacttttgatacgtagccatgtatttaccaaactacgcactgtacgggactagacttgattgaaatttgtgactgggtttggcggtgctttccaatacaaacatcaagtataaaggatttgtattgacccggaaaaaaatcgatcgagttttctggtacatgttgctgaactgagcaagcccagcatcgctaccatgttgaatagacgccaatgaagacactagtcagctgacagcctcaacttacgagtatagacctctccacactgtcaaataccactcttctatacaaattcaagatagtgcgtgtctccattgaatcttatcaaccgcgtcagcttaaccttatttgagcagcttactacagtgaagtgcgtcgataaggaacgggcgacattttatattctacgacaagacatgaatcctcgcttgtacccattgtgtgccaattgtactgaattagttatatgattctaccaatcattcggtcccgtttaacattccgccaatcacagttccgaaaccgagcctcaagagcggctggatggagcggctcccaagtcgggggaaatggaacctaaaggtcgcgagagggaatcatgagcatgaggatcgctgtgagcgcgggaatcgcgccaggtacatgtctgcatgcctcattaaccaactttcgctctgctgctcacaactcccatggtgaccgccacttccagaccgttccagaggtggctacgtctgaccaagcttcagtcgctgctaatctgtcatcgccgtcgtgatctaccgggtgctacctatgctgagttggctgcgtgggctcaagccgagactctggtcgcgaagtccgacatgaactacatagtgcagtaaatcagtgcatttgctgtctgcatgtgacgagtcaaacctttaattatcaatatacctttttctttcaatgtatatcaggcgttccttatcgacgcactttactgtaccggtaggcgttattcgagctgttcaatggagttagttcatttattacgcttggaacagctctccacgagtttgttaccaatcttaccgatagcttaccgggtgcggctataattttgacccgacccaaagtcggtttttcgtccattgcaaaaaaacggttacagctttttcgattctgattgttgcatctgttttctatcgattttagacgaatcataagcagcggtttggcgccgaaagcacaatcattggtttaaaaaaataatttttggggtgcggttataatttcggcgcgcactgtatatcacgtagatgcggtaccgtgtttctggtacaaaactgagggaagaaaaatccaaccggccatttccacatttcccctccaagccttgtcctgtagcgccactgctgtgctgctgcagatggacatgtccagccagttggatccccaggctttggccgcgttcgtggacgacagtgtctttgctcagatgagcggnnnnnnnnnnnnnnnnnnnnnnnnnnnnnnnnnnnnnnnnnnnnnnnnnnnnnnnnnnnnnnnnnnnnnnnnnnnnnnnnnnnnnnnnnnnnnnnnnnnnnnnnnnnnnnnnnnnnnnnnnnnnnnnnnnnnnnnnnnnnnnnnnnnnnnnnnnnnnnnnnnnnnnnnnnnnnnnnnnnnnnnnnnnnnnnnnnnnnnnnnnnnnnnnnnnnnnnnnnnnnnnnnnnnnnnnnnnnnnnnnnnnnnnnnnnnnnnnnnnnnnnnnnnnnnnnnnnnnnnnnnnnnnnnnnnnnnnnnnnnnnnnnnnnnnnnnnnnnnnnnnnnnnnnnnnnnnnnnnnnnnnnnnnnnnnnnnnnnnnnnnnnnnnnnnnnnnnnnnnnnnnnnnnnnnnnnnnnnnnnnnnnnnnnnnnnnnnnnnnnnnnnnnnnnnnnnnnnnnnnnnnnnnnnnnnnnnnnnnnnnnnnnnnnnnnnnnnnnnnnnnnnnnnnnnnnnnnnnnnnnnnnnnnnnnnnnnnnnnnnnnnnnnnnnnnnnnnnnnnnnnnnnnnnnnnnnnnnnnnnnnnnnnnnnnnnnnnnnnnnnnnnnnnnnnnnnnnntgaactgagcaagcccagcatcgctaccacgccaatgaagacactagtcagctgacagcctcaacttcgagtatagacctctccacactgtcaaacaccactcttctatacaaattcaagatagtgcgtgtctccattgaatcttatcaaccgcgtcagcttaaccttatttgagcagcttactacagtgaagtgcgtcgataaggaacgggcgacattttatattctacgacaagacatgaatcctcgcttgtacccattgtgtgccaattgtactgaattagttatacgattctaccaatcattcggtcccgtttaacattccgccaatcacagttccgaaaccgagcctcaagagcggctggatggagcggctcccaagtcggggaaaatggaacctaaaggtcgcgagagggaatcatgagcatgaggatcgctgtgagcgcgggaatcgcgccaggtacatgtctgcatgcctcattaaccaactttcgctctgctgctcacaactcccatggtgaccgccacttccagaccgttccagaggcggctacgtctgaccaagcttcagtcgctgctaatctgtcatcgccgtcgtgatctaccgggtgctacctatgctgagttggctgcgtgggctcaagccgagactctggtcgcgaagtccgacatgaactacatagtgcagtaaatcagtgcatttgctgtctgcatgtgacgagtcaaacctttaattatcaatatacctttttctttcaatgtatatcaggcgttccttatcgacgcactttactgtaccggtaggcgttattcgagctgttcaatggagttagttcatttattacgcttgaaacagctctccacgagtttgttaccaatcttaccgatagcttaccgggtgcggctataattttgacccgacccaaagtcggtttttcgtccattgcaaaaaaacggttacagctttttcgattctgattgttgcatctgttttctatcgattttagacgaatcataagcagcggtttggcgccgaaagcacaatcattggtttaaaaaaataatttttggggtgcggttataatttcggcgcgcactgtatatcacgtagatgcggtaccgtgtttctggtacaaaactgagggaagaaaaatccaaccggccatttccacatttcccctccaagccttgtcctgtagcgccaccgcccaccgggactagcaggcatgcccgcgcccttgccaacgtcgtcatgatactactgccgcattgctgactgtgtactgctgtgctgctgcagatggacatgtccagccagttggatccccaggctttggccgcgttcgtggacgacagtgtctttgctcagatgagcgggaagcttggagcagacgcatcgccaaagaaaaatcttttcgttgcgtggatgctggacaactatcccaacaaagccacactcctactcgaggcctcccagaaccggatacatggattgatacgggtgaagatcagagaagcatacgggcatacacgcgtgtctccacctcttgtacaaactattgcggccaagacggtgaaagacctcctggcaaagtttgtccctgaagcccgctccggcacgcccaagttggatgaaaatgaaatgaagcgaatcgcggaggcgttcaccaagggccggtacctcggcgaagcccacctcgacctcgcacagtatctgcgggactgctggaaggcctacacccccacaaagtacaaggcgccatgtgtggcggtcgtgcagagttctggcttcggcaagagtcggatggtgcgtgaactcgcgattgaggctcaaaagagcgccttgaacatgaaagtcctgtacatgtgtgctcgtgtgcacgagtcgacggggtttcccaaggctacgagcgagcttcgtggttggctgtttcaagaaggctccgaagtggaagacatcgccagtcgattgaagacaatttacgtctacgcgaacaagcattgggcggacgttcagaaggaatggctgaagctgtttaccgaacaggcagcggacacctctgtaaaggcgaaactttcggatgaaacagatacgctggagggggatacctctactgagaagaatccaaatggcagaatcgtggttctggtgatcgatgaagcgagaagtctgctggctgagaagggaggcaagaagaatgacttccgaatgttgcgaaatgctctcagatccgtgaacaaagatatcggccatcgtggatgcattttcggcgtgctgattgatacgaactccaggatctcggacctggcgcctccgctgttgttggacccatcatctcggcttttcgatggagagttggcatcgtttgcgccagttgtgttagctgagacaatggacgcacactgggatcaatactgtgaagaaaacgcagccggcgaagatgaagaaatgaaagaggacatccaagatgtagatgaagaaatgaaagaggaaatactagatgcgggagcagaagatgaagaaatggaagaggaaactcaggttgcggtgggagctgaaaaagacgaagagaagaagaaacagcaagagcgtgctaagatagctatgtacaagagaatcgttaccggggatgcgagtcaagcttggcacgcgttgtgccgcatggggcgtccgatgtggtacagcacttgccccaatcctgcggatagagaagatgtgatcaatcttgcggcgaacaagctgctactggggattcccccttcgcaaaatgcgtacaacaaggataccatgcttggtgtcgcctccatgctttgccgtctgggcgtgcgcccgcattcaacgtcggctctggcatctcgggcgactgccgacttcatggcgattctcgcctatgtgaatttcaagcgagaaggttacgtcaccagctacgcttcggacccagtgctcgccttaggagcgatgaaagtgtggtatgaactgaaacatggtttggcaaagtatatcctgccgcaactcaagaacctccttttggatgaagcattggacaccggtggagttggcgaaattggcgagatggttgctcggattttgctgcttctggcgatggacacgtgtgtgatgggggacaaagacttttcccagtgctgccacacgatcgggcaatttgtaccggtgcagcaattcttgaaggtgctacaaggcaagaaaaagctgccgatatatctcaagcggatgatcagcaaggagaatttgagaccagaattcaacaagtggtgctcgaagtgggatggttggtacatggggttcacccactttgtgcagttgcagcttgagccgaatgaggacacgctttggtttttgctggggcgtcaagctgcaggtattttcccccgtaaccagtatggagccgatttgttgatcccgatgtttaagaagagatccaccagcaggccagtcggtggggagacaacgaggggtgaacaagaggagcaggaagtgttgatgatgttgattcaagtgaagaatcgttccccagtcgatggtgggttttccagggcagcgacggagaaactatgcccctggtttgtgttcggaaagaacagtgatgggaactcgtcagcggggaaatctaccggtgcaattggtagggatccgaacccgctgagctccacggatgtccgtgataccattcgcatctacatgaatgtgcgcggtagaacgcgtgacggcaagttcatctatgccacgacaatgaaagacaatcttaagcccaagaagaaaggcaacgcctctgaggtgaaggaggagagtcaggcgaagaagcgggcgaagatcgagagcaatcctggcgtctcaagtgtgtcgagtgtctcggaggaggatcctgttttcacgatctgcctccgtttgctcaacagggtcacctacccgttcctgagcgaggacgtggcttccattctatcaaacatggtggagtctcagtatgacccgctggggcttgtggagggcgacctggactatcgcgatgaagatgaaaaacgaaacaagaacgttagttcgtatgcaaagttgtcgcttaccgcgacgcgcgacaagttgttgcagaacgcccgtaaagcactagcgtacgcgccgggtgacaaggaagaagagtgacgctgagagtgacgttggtggcagtggtgagggccactaggcgatcaaggtggcgagacggaaacatccaagaaacgagcacgtgaaaaccaagagggtgaagaagccgtcccactaaacgcgccaagtgatccaacaagacgcccaagcccacacggaggcagtaacagtacgtgcctggtgcctgcagcaactaccggtagttttaactaccaacaatttgttttacttgagagtacgcagccacctccagtacgcttcaccttgcagtcttacggaagtagcacgtcttttgctgtctacgtcgtctttactgctctacctactcgtcctgcaggaacgggtattatagtccgtgtacccgcgcgcgtcgccgaggtagaacgtgtccgtgtcgtagtcgttcacgggcttgttgagttggaagcgccgcaccaggtccgggttcgagatgaagtggcggccgatggccacggcgtcggccgcgccctcctccacgatctgcacggccgactgccggtcgaagcccgacgcggcgaggagcacgcccttgtacgtctcgcggaactgccgcgccgagcccttctcgggtgtcagcgggtcacgcacgtggtagccacgcggctcgatcaggtgcgcgtaggccaggtcgtagttgttgagcctgttcagcacgtacgtgtaggtggcgacggggtccgagtccttgtcgccgaagctgccgccgaacggggacagtcggatgcccaccttggacgagtccagactctcgaggatggcctccagtgcctcgaacaggaagcgcgcgcggttctcgacgctgccgccgtactggtcggcgcggtcgttgatgccgtcgtgcaggaactgctccagcaagtagccgttggcggcgtgcagctcgacgccgtcgaagcccgctttgagggcgttctccgcggccgtgcggtagtccgacaactgcaggaacatcttgccgtgcacggccttggtcacgtggcgccaagcctcgatctgctggggcgcgaagatgtcaggggagccccaggatccgcggcccgtgggcgtgatgttggtggccccggcgatgatgaggccgccgggcgccgctcgctgcttgtagtactcgacaactgcaggatttctcgacgttttcctactgcgtttttgacgcaatacgaacgatgtgaaagtagagtatcgcggcgatatatacgttatggacaccagggcctcagagttttagtttttcacactattagaacgcctaggcgttgtattcggatagaccgcctagtaggcgttctattttatttcaatgcctgggcttctggtacggggtaagacagtagcaggcatgcccccattctcgccaccgccgccatgatactactgccactttgctgactgtgtactgttgtgctgctttgcaggtggacatatccagcgagttggactccgacactttggctgcgttcgtcgacgagagcgtattcactcagttgagcgaggagcttcggaagacgaagaatggcgacgatcagccattggcgaagagaaatcttcctatgatgaattatctgaaacaatttgtcgaccccagcaacctccggggctcccaaaaaaacaatagatagcttaaccctatcgttaccagaatgatacatcaagtatctttttactggtgatgcaggagcaagataactgaaacagcaattttctgagccacgacagtttcctcgccgtttatgaccaatcatacagctaagagggataggtaaaaccccacgctattgtgtcttctgtagtatatctatcaacactattgtgtccccaggggcacggatgcgatcgtcgagcacaacgccagcggcagccgcacacaggtcgccgccggaagtagcggccgcagtgccgccagcgacatcggcagcagggtctcggacacgatggaggtgaccgtggccttggaggacgcggtcaggggcgtctccgccgacatggacacggacacggacgcgatggtggcgggggactcgggcagcaagcataacggcggtcgcagcgccgtgtgtgcgccggcaacatcatgaccacggacgcttgggcgtgaccgttgtcgtgctggaggtggtcgtgggtgcctccaccggcacggaggttggcaaggatgtgaccggtgaccagacagcgtgcgcaaatgcatcgacagtgcggaaggagaccgttgtagaggtgccagcagtaccgtcagcgacatcaacagcgtgacgtcctttgtagagatcgtgtccgtacgggaggagatcggaggcaacttcgtcagcatggagtcggacgcaatggtagcgggcgactcgggcagcgagggcagcggccgtggcagcgccgtcagcagcatgacctcagatgtggtggtggcgaacgtggccgtgctggatgtggtctgaggcgtcttcgctgacatatacacagttgggagttattgttcggcttggaggcgcgtggaatttctaatagcatcctgtcggattatacgcagtggagtgtggttagcttgccgctatggtgcaccagtggtgaagcggtatgttgtcagccacgagctaaatccgcatttacggcatcaagactagcgggggcagatggaatcggtgtgacttagtgcagtgaagtataaatggttagttgactttgactatcttgaaaaaatgatgtgaggttacgccttggtggctgcgttagccttcttttgatcttggcgggccttcagaaatggacggctagctacataaattggagaggttcgtcgcaagttgccgtcgacagtgtacacttgcttcggcaagtaaaacaaatggtatttctgccagcaagtccaagtttgctgttggcacagatgctgcttcgtagggtcaacagggtatgtgcgcttgcacaacgcaactcgatgggtctcgcagtagtcggttttctcggaaggatctctgccctcgaacttgcacacagtgcatttccgcattcactatggggcttgcatgggtcaacgtaactctggagacgatgccgaagccgttacagcacttacatttggtaggaatactggagtaaatctaagtaccgtatgttacagttgaacgctttgagtactcgtactattcatgactctgtgtaattacactgtattcatcccgcactcgatatccgatgcattttgcacggtaccttgtcagcacagctacgctgcattccgcatggcgggcattgaacctgcaccggtgggttcaaactccaccatactaacatcacatacaacgatgagtcgaaccaccccatacaaagcctagtacgttcggtccctttgaacacttcgaacatggccatacaaataacaatatattcggtccaatggctcaagcgagaccgatgcatgcaaaccagttagagatctttgccgtgaaggagccactggtacgctagctgagctcgtccaccaccacatacccaatgccacgaaagcggaagcagcggtcgagcacctgcgagcccacagctaagcgacaacaatcacgacgctcgggtcttatctcaccttcagctcccaccggtctaggtacgatccgttgcttacctagcgctcgagcaaggtatcatattgaggcgtgtccaccggcatacagacctcgcggatgaccatgtgatgtttggatctgtttggcgagttctaagtgcggctggttggagttcaaagcgtccaacagggcgaagcttgagtgatctgtaccgctatatccgtcccggtggtgactcgaatggaacagagggtatcgactattttctgggtgaacgagcgcttttggagcactatcggcggacattggtagtggaggatggtgatacggatggtgccctgtccaagcgacccgatgacgaaattgatgtcgaccaaaacaacgttaatatatgtggggctggagatgttggtctcaacgcggcagatgatgtacgtggtagtagcggcggagttcctggagcgagtgcaaacgacgttgattgtgagaaagccgcgcttccgggagtaagctgtcacgaatcggtgtttgatggtgctgccagcacctctcaggattatgatggtgctgcctctgctgtatctacaccgccaacatcagcgcgcgtcgtacccgtacatgcagcagctacgcgagaccatttactccagctagatcaccacgcacccaccgcatcgtctggtacatgtgcgcaatgtgcagtctgcaatatggagtgttcaaccgagcgcagttgtacctggtgcaaaaaatgtctccatcacttctgctctcatgatgtctgcgtttcgttgaatatcccagaccctaatggtggattcgccaaggattttggtgatagcagctattgcagcacgctttgctacacaaacgctacaaaaatgaacttggtggaccaagggagaagtgatgaacgacccaatgccctacttgacctccccacgagtgttttgacgccaagtgtggctccgttggaacctgcagagaccaacgccgccacacctcctgctacaaattgctcgggggcagcaaaacctaagcgaaaaaagcgcggtcctgccgaacaatcagctccaaaggcaccccgaagcgaaaaccaagctgcgcaacggaaaacgaaaagcaagaaggcacctaccaaggccagcaaacccaaggctgtggcaatgaaagaagagttgattcgccgagcacatgcggctgccgaaaaatnnnnnnnnnnnnnnnnnnnnnnnnnnnnnnnnnnnnnnnnnnnnnnnnnnnnnnnnnnnnnnnnnnnnnnnnnnnnnnnnnnnnnnnnnnnnnnnnnnnnnnnnnnnnnnnnnnnnnnnnnnnnnnnnnnnnnnnnnnnnnnnnnnnnnnnnnngatgtggtcgaagcatcggcattagacacgacattgacaattgagccatccacccaactagctgcgacaatatgcttctctaagcatacaccttgcttcatgtagcctcgcggcttcgcgtcctccttacgaatcatcgtaaaatgagggaaatgcttgctagatgtgcgtacagtgccacgaccatagagaccaatcgatcgtaaagtcttcaacagcaaacaggaagtgtagaagttgtccgtgtttacaatgcgactggatcctttcaaagatgaagtaaccgccatgacgtgagagcggatttcagacgacttcgcggttagatcagcgaatttctgcacttctgagcgtgaaattacaccgtccagccgatcatcgagttcactggagcagtgcaacttgaaactcaccgcgtaccacgaggtagaacagcaacacacgtataacttgaaatgatactttccggtgggtttttgtgggttgaagactataatgtggcgggcgtactgggatcggcaggcaattgtggcctcatcaacagccacgtttcgaccgacttcaacatggcgcaggcatcgcgatttcagaatgctcatgagtggtcgtattctagctacaggaccgcgcttgatgtcggaggtagacaccttggaacgaaaactcaaattcttacggatgtacaggaatcttcgccatgtcataattgacttcaaactagtagtacgcgctccaggaaaaaatagttgcttcctcgtcgtccacccagtaatttctcatctcacccttgtcgaacagagtcatgtaccagaggatcccatccggatgtgtaaatagccctgacggttggccaagcgatgctgtgggtgaaaatgtcattgacgctatctcttcgacttcaccagggcacaaagggcgctgcaattctttccgcccgcgaaacgcaaaccactcacgataaccacgctcgtccatctcctcaaattcatctgtcagtgcaggaatgtttgatagtttggggaccatgttgcacagggacgtccaagactctccaaattgaagtttgtctttttccatgttggcaaactggcggataccacgggtgatggtggcttcggaaacatggtgaacgtgatattttatttgaaaagcagtacacgtccattgaacctgaaatttgtcgtgaggaacgctaacattgtcagcatttttttcgcttgccaggctgtagcgagtcaccacactaatcaaaaatgctgcgccaacgtcgcgttacaaactgagcggcatccactcctcatcagccggtgaaaatgctacgctagcatcaacaaatttttcggcagccgcatgtgctcggcgaatcaactcttctttcattgccacagccttgggtttactggccttggtaggtgccttcttgcttttcgttttccgttgcgcaccttggttttcgcttcggggtgcctttggagctgattgttcggcaggaccgcgcttttttcgcttaggttttgctgcccccgagcaatttgtagcaggatgtgtggcggcgttggtctctgcaggttccgacggagccacacttggcgtcaaaacactcgcggggaggtcaagtagggcattgggtcgttcatcacttctcccttggtccaccaagttcgtttttgtagcgtttgtgttgcaaagcgtgctgcaatagctgctatcaccgaaatccttggcgaatccaccattagggtctgggatattcaacgaaacgcagacatcatgagagcagaagtgatggagaatttttttgcaccaggtacaactgcgctcggttgaacactccatattgcagactgcacattgcgcacatgtaccagacgatgcggtgggtgcgtggtgatctagctggagtaaatggtctcgcgtagctgctgcatgtacgggtacgacgcgcgctgatgttggcggtgtagatacagcagaggcagcaccatcataatcctgataggtgctggcagcaccatcaaacaccaatttactcccggaagcgcggctttctcacaatcaacgtcgtttgcactcgctccaggaactccgccgctactaccacgtacatcatctgccgcgttgagaccaacatcgccagccccacatatattaacgttgttttggtcgacatcaatttcgtcatcgggtcgcctggacagggcaccatccgtatcaccatcctccactaccaatgtccgccgatagtgctccaaaagcgctcgttcacccagataatagtcgataccctctgttccattcgagtcaccaccgggacggatatagcggtacagatcactcaagcttcgccctgttggacgctttgaactccaaccagccgcacttagaactcgccaaacagatccaaacatcacatggtcatccgcgaggtctgtatgccggtggacaagcgtcaatatgataccttgctcgagcgctaggtaagcaacggatcgtacctagaccggtgggagctgaaggtgagatacgacccgagcgtcgtgattgttgtcgcttagctgtgggctcgcaggtgctcgaccgctgcttccgctttcgtggcattgggtatgtggtggtggacgagctcagctagcgtaccagtggctccttcacggcaaagatctctaactggtttgcatgcatcggtctcgcttgagccattggaccgaatatattgttatttgtatggccatgttcgaagtgttcaaagggaccgaacgtactaggctttgtatggggtggttcgactcatcgttgtatgtgatgttagtatggtggagtttgaacccaccggtgcaggttcaatgcccgccatgcggaatgcagcgtagctgtgctgacaaggtaccgtgcaaaatgcatcggatatcgagtgcgggatgaatacagtgtaattacacagagtcatgaatagtacgagtactcaaagcgttcaacggtaacatacggtacttagatttactccagtattgctaccaaatgtaagtgctgtagcggcttcggcatcgtctccacagttacgttgacccatgcaagccccatagtgacggtccgaactacggtacacggcgacagtggtgacgcccatcgtagatacactgctgccaagtgccaatgccgtctgcgtgtccctgtcgctgggcaaattgggcgcttgcgacgtcgtcgtcatggcgacttcaggctccatcttgacccccgatgggactcgaacgctccatttctagcggtagcctctcttgatctttgtcgccggtggcaccccgctccctcctgaggcatctacgtgcggttgtccgtcgatgaggatcgctggaagcgaaaaagggcgggagaacgccgtccacctgcaggtctagtgggcagtcgtccagtgccgcctccgacgctccatctcggggtcctgtagcggaatctcggcgtctcgcagctgaacgtggttgacagccacacccggcggcaatgccgtgaggagagttgggggctacgggacaaacgacaccatcccagcgccagttctagtagcactgcgttatcgacaacaaatgcgctgttgcggcggttgtgcgggacgtggtcgtcgggtgggtacacgacggacagcgagtccaacttcatgcccggtgcgtcccgaggtcagcgcgtcaagtagcacaggcggtcagcagcagcagatgcgtcgacacacagaagctgagcgtgtggcgactccaacgacgctggacttggagagtgaggggcgaactggcaggctggacttgaccgcagcgtgcatagtatcacgggcagccacgcgccgtaaacgatgggtacggccagcacatgtgtaccaccgtcgttcgaggcgtggaaaccggaagaacggagcgtggtcagccagggacacttgggatcgagcttgcaaaatcggaaatgagctccgatgcgagaaggtcattttgattcggagcaagccgagcaagccgaccaaacaacagtggatcgatttgaactaattccaccaatcacacttcttgttcaactttggcagccaatcactgtcatcgaattttcggagacaggctttgattggtcaaagcgaagannnnnnnnnnnnnnnnnnnnnnnnnnnnnnnnnnnnnnnnnnnnnnnnnnnnnnnnnnnnnnnnnnnnnnnnnnnnnnnnnnnnnnnnnnnnnnnnnnnnnnnnnnnnnnnnnnnnnnnnnnnnnnnnnnnnnnnnnnnnnnnnnnnnnnnnnnnnnnnnnnnnnnnnnnnnnnnnnnnnnnnnnnnnnnnnnnnnnnnnnnnnnnnnnnnnnnnnnnnnnnnnnnnnnnnnnnnnnnnnnnnnnngcccgagtcgcccgccaccatcgcatccgtgtcgcggacggcggagacgtttccgaccaggtccatcaagaccatgattgggggaatgccgatggtagggcgtttcggcgagggagaacgggtagagcggtcgcgatacataatgtcacataaatagacgattggtatttgaagtggtttacacaacatgtaaaggctcgcctttttggtgcccattttgctttggttgatcttttcaagctttcccgcgctgacattttttttcatgtcttcgctttgaccaatcaaaacctgtctccgaaaaatcgatgacagtgattggctgccaaagttcaacaagaagtgtgattggtggaattagttcaaatcgatccactgttgtttggtcggcttgctcggcttgctccgaatcaaaatgaccttctcgcatcggagctcatttccgattttgcaagctcgatcccaagtgtccctggctgaccacgctccgttcttccggtttccacgcctcgaacgacggtggtacacatgtgctggccgtacccatcgtttacggcgcgtggctgcccgtgatactatgcacgctgcggtcaagtccagcctgccagttcgcccctcactctccaagtccagcgtcgttggagtcgccacacgctcagctcctgtgtgtcgacgcatctgctgctgctgaccgcctgtgctacttgacgcgctgacctcgggacgcaccgggcatgaagttggactcgctgtccgtcgtgtacccacccgacgaccacgtcccgcacaaccgccgcaacagcgcatttgttgtcgataacgcagtgctactagaactggcgctgggatggtgtcgtttgtcccgtagcccccaactctcctcacggcattgccgccaggtgtggctgtcaaccacgttcagctgcgagacgccgagattccgctacaggaccccgagatggagcgtcggaggcggcactggacgactgcccactagacctgcaggtggacggcgttctcccgccctttttcgcttccagcgatcctcatcgacggacaaccgcacgtagatgcctcaggagggagcggggtgccaccggcgacaaagatcaagagaggctaccgctagaaatggagcgttcgagtcccatcgggggtcaagatggagcctgaagtcgccatgacgacgacgtcgcaagcgcccaatttgcccagcgacagggacacgcaggcggcattggcacttggcagcagtgtatctacgatgggcgtcaccactgtcgccgtgtaccgtagttcggaccgtcactatggggcttgcatgggtcaacgtaactgtggagacgatgccgaagccgctacagcacttacatttggtagcaatactggagtaaatctaagtaccgtatgttaccgttgaacgctttgagtactcgtactattcatgactctgtgtaattacactgtattcatcccgcactcgatatccgatgcattttgcacggtaccttgtcagcacagctacgctgcattccgcatggcgggcattgaacctgcaccggtgggctcaaactccaccatactaacatcacatacaacgatgagtcgaaccaccccatacaaagcctagtacgttcggtccctttgaacacttcgaacatggtcatacaaataaccatatattcggtccatcatatccacccaacaacgctgatctctagtacttcatcattctagattctgcgctcaagtggaaagatggttgatcgcaggaaggacgcggataatgtagaggtacgtgttttggctgtttcggcatcgtgttgttatgctagtgctaatacgaacggctatgtatgggtagttgccaggaccaacgaagacgcatgcaagcgatggaaggcgaatttacggatcgtccaagacgcttgaaatggtagtgatgacattgtttcggccgnnnnnnnnnnnnnnnnnnnnnnnnnnnnnnnnnnnnnnnnnnnnnnnnnnnnnnnnnnnnnnnnnnnnnnnnnnnnnnnnnnnnnnnnnnnnnnnnnnnnnnnnnnnnnnnnnnnnnnnnnnnnnnnnnnnnnnnnnnnnnnnnnnnnnnnnnnnnnnnnnnnnnnnnnnnnnnnnnnnnnnnnnnnnnnnnnnnnnnnnnnnnnnnnnnnnnnnnnnnnnnnnnnnnnnnnnnnnnnnnnnnnnnnnnnnnnnnnnnnnnnnnnnnnnnnnnnnnnnnnnnnnnnnnnnnnnnnnnnnnnnnnnnnnnnnnnnnnnnnnnnnnnnnnnnnnnnnnnnnnnnnnnnnnnnnnnnnnnnnnnnnnnnnnnnnnnnnnnnnnnnnnnnnnnnnnnnnnnnnnnnnnnnnnnnnnnnnnnnnnnnnnnnnnnnnnnnnnnnnnnnnnnnnnnnnnnnnnnnnnnnnnnnnnnnnnnnnnnnnnnnnnnnnnnnnnnnnnnnnnnnnnnnnnnnnnnnnnnnnnnnnnnnnnnnnnnnnnnnnnnnnnnnnnnnnnnnnnnnnnnnnnnnnnnnnnnnnnnnnnnnnnnnnnnnnnnnnnnnnnnnnnnnnnnnnnnnnnnnnnnnnnnnnnnnnnnnnnnnnnnnnnnnnnnnnnnnnnnnnnnnnnnnnnnnnnnnnnnnnnnnnnnnnnnnnntccaccatactaacatcacatacaacgatgagtcgaaccaccccatacaaagcctagtacgttcggtccctttgaacacttcgaacatggtcatacaaataaccatatattcggtccatcatatccacccaacaacgctgatctctagtacttcatcattctagattctgcgctcaagtggaaagatggttgatcgcaggaaggacgcggataatgtagaggtacgtgttttggctgtttcggcatcgtgttgttatgctagtgctaatacgaacggctatgtatgggtagttgccaggaccaacgaagacgcatgcaagcgatggaaggcgaatttacggatcgtccaagacgcttgaaatggtagtgatgacattgtttcggccgtgctgatgctcatcgcatatatagtctttggttttgtgtagcgccggtgagcaactggagttcgacaatctgtatccagtatttgtgaccccttctgggcgagagcgggtaagttcgtgtagctacgcaataacgtttggctaaagctaatcagtgcctacctgtagagaaccgaagcgagatgtggcacgtcgatcgacatagacgacttcataattgcactgccagtgaaagagatgaacgacctctacgtggcgatttgtcgcggtgaagatgaccgtgcgcacaactttatctggatgatgcgttggcaggagccgtgcatggagctgtctgaggtaagccaaaatgtgtatcgtggctggttacgggtaatgatatctatgtttgatttcgatatgaaaatgtagatcacgcgaccgcaaattcgggcacgtctaaaatgtataaactccaacttgttgcggtatcgcgaggagcaagacgaacatatcgagcgctttatcgcgatggaggcggacccttccacaccacacgacaccctcatgaaccattataaggaaggccttgacttgcagaaacgctacaacatagttgccgatctagccacaggtatggacagagtcgatatgctggcggaccaactcaaggatcaagctcactggacatgctcttgcgagaagcgcgcataccaccgctcgccccaatggcttcaagagcaacctctcgacttggcaccacaagctctaaggccgcgctggttttggcctccccgctatcatgggtgatatccagttgattcgcagagcaggacgctccaaggtgaaaacacgttactgaagttactatgtcctccccctagtaacagagctatatgcaattaagttgaatgtaatatctcaagtaatgtttcatctagtgtgaattgataattctaacgaaacccaaagctgtctgaatacagtgatcctttgctccagcacgtatacccattccgcccacatccaccaaggccacggtcacctccatcgtgtccgagaccctgctgtcgatgtcgctggcgacgccgctgacgctactacccgcggcaacctgcgtgcggactgccgctgtcgttgcgctcgctgcccgagccgaatgccaccgtcacgttcgtgaccatgccagcggagacgcccccgatcacatccaacacggccacggtcgccgcggaagcctccgagaccatgctgttgacggcacacacggcggcgctgcggccgccgttgtgcttgctgcccgagatgcccgcagtcatcgcgttcttgtcgccgccgtcggagacgctccggccaggtccaggacagccggcatagtcgccagcgtcgcatcggagaccacggcgccgccgcttcacaactaggaaaagccccacataatccacaagatggcgctgtgatccacggtactgctcttactaaagttttgttagggtgctgttctcacggtactgcttccactgatacttttgtcgattcgcagcgaatcacagagaagcagtaaaatgatgcctcacgtatctttttgatcgaaaggtcgcttcaaacctcccatcacgtatacttttgatcagttggcctcgcaaacctaatacagcaaaatgatacctcatgcatcattttaccccgttttacttaaagtttgtatggtgtcccttcaaacagaaatgtatggcgttaacgatagggttaatattcacgaagatcatggacgtgtacgagattccgggagtgaccttcgatctggcggaaactatcgcggccaagacggtgaaagacctcctggcaaagtttgttcctgaagcccggatgaaaatgaaatgaagggaatccccttcccgtcaggaaaatacttaacggatagcgccaaatagcgtacccttcccgaattgaatacctcctctcaaatctgatagaatgtgctcagtatacaaagctattgtacctacgccaatttgtatacctcaaccaaaccgtatagaacgttgagtacttataattttcttgaaatttatgtgaagtttagcatataaacaccttttgattggctaagagatgtcataaaattgaaaatcaccctttattttccgtgtaagtattactttgtcaaatacggcaagcaagatccggttatttttatctttttaaagaccacagtttaaaaactgacacttgtattcggtactgtttgcattttgtgtaactttacgcaaaattaccgtaaggtacccaaagaaaaatggttttggttgttggtctaagttctgcttgcatctaacggcatgagagacgttgtgaaccaactctgcgcaatctatggatgtctccatggtttgaagactggtacatacgttggcaggatgccatcaaagaggttttgcagaacgtagctagctctacacacaatatttcagacttgaatgcgtcggagctactttggtagtataacccccttcctatttgtatatctttctagatttgacaagtgttcaattcaatagtatgcggtatacaaattggcgttttccgttagctaccgtttttgccatcggtgcagtgtctaggaatcgaagcacacacagcttgaactcgtacgtacttaagtaatcgcaacgagcgctcgtactgctttggccgcgcgtcaccttcactttttaagcgcgttctacctgttcgcgccagtcaaaatggcgtaacgcaacgagcgcggctatcaggcttcgagattgaatgtcttatttcaagtgtgaattatatggctttcattggataatcgaaagtgtgctctatgatatatatgtgctctatgatattgtgctttgcaaccggttttccctcctaattagtgcactagatagtgttcgtacttagtggtaaatcatagtggctttgaagtcgtgtttcgaagccagcttggctcggaaatggcactttcggaaagtgccaaaaggatgctaatccatgctggatgtgctaaatcatgcaggagatgacatacgcgcgaggaattaagtttcaagtagattgaagcctttttgtaaaagtctaagtaggtgaatgcatcaatttgcaagtagattgccacagtcaaaaataacgttttatcgtatccgaattgaacgttaattttatgggcaaaaataactgttttccagggccaagtaatatcgtacgaaattacctttttagagtaagagtgtcgtaatgctaatgtgtaagtttacatcatcgcttcgtagaattgtatgcacgcagaccaaactaacgcacttggttctgtattaaaacttcgtcggccgcgcgtctgataagtacagttgggtttgttgaaaagtctggaagcaacaacctacgactcgtaagttttaaaacggacgggcattctgagcaggccacgcctctgttaagtactcttacgtttattgtaacgtacgacagcaataacttacgactcgtaagttttaaaacggacgggcattccgagcatctcacttcgcggtattctgagcttcttgtcgtacattttgaaacgaacgttcatactttttttcagtatcttgggccggagcttagcaacacatctctgtaggagtttcataaccacctcgtttagcccgtgttctcttagctcgcgagttttcactgcagggctcattcgtctttttgtcggatacccacccaactacacgtctcaacacctctaccacctctcctgtttcggtcacccggacaatgtcttcgcccatgatcacctcatccgctgtcgaagaagcggacatcgccgaagtcatcgagatgcgcatgctacgacctgagctagatgtcggcttggatcccctcgacccctcttcttacggcgtagtttccgaccatgggaacaacgttgcgtctgcgacgcttgagtcgaaaaaggctctgctgcaacgctgtcgcgagtttgctcgagcccgtggcttttccattcgcgtggccaacaacagttatcactctcgtcgtcaagaaggaaacgccaagtacacttgcaaggcggtgaaagggcagcagcagctcattccaggcagcactgccaactgcccatttttcattacggtgtacgggatccgcaacaactggaagataacaaggatgtgtctggtccatgaccacttcagacacggcggttttcagggcgatacctttgttgaaggcggtctcgcaggagatacctctcgtcagcgacttcgcgatgtgccctaccgagtgatgaggggcgtcgttgatcgtgagttgctcccctcttacagcggaacgtgggcctcgggcacagggcgggctatcatcgactttttgatgactaaggggatgataacgagccgaactgcggcatccaagatcaagcgggatcttctcgaatcgctgcgcgacgacgtcgtcgggagttaccagaagctggagggatatctagccatggtgagtgatgcgaactccaagacaagctacgggtttggcaggcgcgagaatgacatgttcagaagggcttgcgtttttctaggggcatgccttcaagtacactgccgacacgtcatcggcctggacggaacacatctcaagggtgatatgaacaagcgcggagtgtttctgttggcgaccacgaaggacctaaaaggccatgtggagaagcgcgagaacaagatttgttctctgagaaaggcggcataaacgatcgaccaaaaaatcaaggggatcaatgatcgagagaagggcgacctgaacaagactgggattgcggagatcgaggagattcgacgagcgatcgaggcaccgggatgatactcgcacgtaggcggggtgtggaaccaggtagatcaaagctgatcgacacatggagagtggtgatgcctcgtcccacaccgatcgaagaggcgccgtgcgaagggcgcatgtcgaaagcgaaggacgtcatgcacgagggcaagatcaacgagcgacatcgtagagtgggacggctgaagaccgaagtggactgatcgtgatcgagagctgtggatcgtcgatcgtcgatcgtcgatcagccaagatggggagcacatgggggcgaagccaggacaagaatccagtagttgtttagttgtaggatggtaggtgagatggtagtggtagcgagacaccagctaaacataaatcagagcagaatttgcaccgaagagcacaagtccctcaagtcgtcaagtctctggaactacattggcctcggcaagcatcgacactttggacagtgagctagtggtacggttaagactggattaatacattggccagcttgacctactctagcgatctatttcttgtgtgcgaaccctcgatcgaccggatactgcttggccggcgatcgtttctcctctcgatcaacctcgatcccgctataggaagcggcaagcaactcacgaaaggaaggaacacatccggaaaggcaactacaggccgtggatcgactccaggccgaccgatcggagcgaacaaccctcgatcggagcgtatactcggacgcagagcgaagattcccgcgctgctccacaacctatccccgcgtcacgccaatacattcgatcttcaccagattttggccgatcccgctacaccacatccacatcctcgatcaagaggattactcattggagctggttcctgcagaacatgaaagacgcgcttcaagacgtctcggcgtggaaacctgtgttcgtatcggacagacagaagggtctcctggcgtctgtgacggagttgtatccggattccggacatcgattttgcgttgggcacattatcaccaacatcgagaagaagggctccgcgctgacgccggcagaacagtcacttgtgtttcagatggcacgtagcgaatgcgagaacgactacaagttttacagctcaaaactctcggagactcgccctttggctgtggagtatctcgctggaattgacaagtcgcactgggtgacatacgcgttcaacgaaaagtacaaccaaccctcttatgacgaggtcacttccaacctgtccgaggcagcgaacagttggttgggcaatgcattgcggtcgtcctaccccttggaagctttcgagcaatacttcgtcaaggtgtttgagctgttcgccgaaaggcgccgcacctcctcgcgacagaagggtccaggtagcaacgcaggacacgcaagcacctcccaaggtgagccgtacgacgattgcgaaattgacgtgatgaggaccacccctgcagccttctcggactttctccttcccacctacaagaagaagctcgacgggatcatggctcttacgaaaaccctgcagattttgccgtgccttgatggccagtacgtggtgcgattcacggacatcagcagcagaccggaccacgcccatctgtggcgaaccgtgaacttgatcgagaaggaatgcaacgtgccgacgctggcaagacctgatgttcccgtgtgtccatgcagtcaaagctgcaattcatcacggaatgcacgtgagcgagcttttcgcctggaaggaacacaccgtgtcggtcgcgcggcggacatattactaccagtttgtcccgaccgtccgctcggcgaccatcgctcaggatcttcaactgctagtacctgaagtcatcgtcactgaagctgacttagggaagcgtggcatgaagccgggtccaaagccgaagaacaaacgcaggtctgcacgaccaggttctgcggcgtcgcctgccattgctttgactcaataatactagagctgcaagacgtatgcagtagagtcgtaagtctttgcaaaagcataacaaagcaaaaattacatgtcgaattcttagtgtcaatacgtcgagaacggaccttggttttcttaaaattcttctcgtacgaaaatgatatcataaaattcttatttacctttaatacaacttggatcgaaggaaagtattatacacgtgatagttcaaggatagataatatactgcaaggataaacttaagtgaaagatattatatctgtaatatcgtacgaatgtgttactttgatgcttactgtgacttgacgaaaattggtattccatagcaacaattcgcacgatcgtacgactttacttcccagtaatacaactcgttcttgtgcgctattattgatactgacgcaatgtaaatgaaagaagtatatacaacaaatttattatcatttgctgcttagaccatttcatcaaaataaagtgaaaaaaatatttttaattactcaaaaatgaagaaaataaagctgtatggctagccggatggctacatccgaatgggaactctacacgtagggcagttagctacatcttcggcctgaatgcttctcgccacgtacattgacatgcactcggcacacatggcatgtcagcatgagcgcggggtgaccggcgccactggcgcgtactagcaaatggcgcaagttgataggtcctcgtcttggtcctcctcccccgtaatgtcgatcaccgttgggggagctggtgccgagaaaacacgacgtcgtcgagcagagcggggaggtgagctctgagctgttgttgaaccccctaactcaatgtccccaggcacagacaggacgagcgactcaacaacagtcgtggtcacgtcacctgcggccgtagtgatgatacacaggtcaagctcgttaagcgcgtcacggcgagcgcggtggtacagcttatcgtactcgcgcttgtaggctcgggccttttccagtcgctgagcctttaggatcgggtaccgcttttccaggcacgcacgcttgccaatgagctgccgcagacttgagacaacccagttggtgttgcacagggggcagttggcaccatgatgttttcaataatgaggcacctacttattttgttatcgctgatgttccgtttgctcgtcctccatcatcttcatatcttaccctgtccttaattcttatcgcgttttcaagttctgataaaacgttatttttgactgtggcaatctacttgcaagttgatgcattcacctacttagacttttacaaaaatgcttcaatctacttgaattacttaattcctccatatgcgcactacttattagggcatctccaccggtgctgagtaaaactaaaagcaaattgccctaagatccgtgcctacaacggcacaaccgtgctaaagacagtgcgcagctccaccggcaattgagactcgcagcaagcgcgttaaagctcttggttcggcgccagccatggcgacggcgcacagctgtatagccctataaagggcccggcagcacgttgaggaagacccagggatgacgtagcaagggcgacactgcggtctgtgacgcttgcgctgcttagaacgcttgacttggccctactactggtcggtcgacatttacatgtactcaaccttttactcaaagcctcctccgttggcaaacttgtgcaaaactttgatctgcgtaaaaaaaatggagcaatttgctcagcatttactcaaaccggtggagctgtacaaaactaaaactatgattaaatattgacagaaaaggggtaaaatttagttttactcacgaccggtggagatgctcctagtgctgattcatactctttcgtaagacgatacttagccccagaatgcctatcataagacaaagcgtcttacgttttccgatcaacgcgttttgactacatcttggttgttgtataccagtggctacattgcatattgtctgtcaaaacataagacagtttgtcggacactagtttgcgccatacaattggccaaaaatgttcaggtctgctcgccacgacagcggcaacgttgagcgccgaaacgatgcagttgcatggtgcggtagggaaagtagcctcctgttcacacacgaagcgatgtgcctgtagttggccgctggcagcaagcttaaatatcggcataatgactgcacgaacgcgtgcatgcagtccgtggagctgttccactcagaggtgcagccgttgtagggcacggagttacgatgaagtttgtagacgtagactaagagggacaaatagctcgtaacggtactacatgtacattttaatgtagtaatttttatgcttgagcgtacatcatagtagttgtgaaggcgaggcagccagggaacggtgttgccagtgggcttcccgagatcctccgaccccctcttacctaatcattacagtccagcaacaaaatgcaaccacgtactctgcaacggcgataacacctagatatnnnnnnnnnnnnnnnnnnnnnnnnnnnnnnnnnnnnnnnnnnnnnnnnnnnnnnnnnnnnnnnnnnnnnnnnnnnnnnnnnnnnnnnnnnnnnnnnnnnngagctctgagctgttgttgaaccccctaactcaatgtccccaggcacagacaggacgagcgactcaacaacagtcgtggtcacgtcacctgcggccgtagtgatgatacacaggtcaagctcgttaagcgcgtcacggcgagcgcggtggtacagcttatcgtactcgcgcttgtaggctcgggccttttccagtcgctgagcctttaggatcgggtaccgcttttccaggcacgcacgcttgccaacgagctgccgcagacttgagacagcccagttggtgttgcacagggggcagttggcaccatgatgttttcaataatgaggcacctacttattttgttatcgctgatgttccgtttgctcgtcctccatcatcttcatatcttaccctgtccttaattcttatcgcgttttcaagttctgataaaacgttatttttgaccgtggcaatctacttgcaagttgatgcattcacctacttagacttttacaaaaattcttcaatctacttgaattacttaattcctccatatgcgcactacttattagggcatctccaccggtgctgagtaaaactaaaagcaaattgccctaagatccgtgcctacaacggcacaaccgtgctaaagacagtgcgcagctccaccggcaattgagactcgcagcaagcgcgttaaagctcttggttcggcgccagccatggcgacggcgcacagctgtatagccctataaagggcccggcagcacgttgaggaagacccagggatgacgtagcaagggcgacactgcggtctgtgacgcttgcgctgcttagaacgcttgacttggccctactactggtcggtcgacattttcatgtactcaaccttttactcaaagcctcctccgttggcaaacttgtgcaaaacgttgatctgcgtaaaaaatggagcaatttgctcagcatttgctcaaaccggtggagctgtacaaaactaaaactatgattaaatattgacagaaaaggggtaaaatttagttttactcacgaccggtggagatgctcctagtgctgattcatactctttcgtaagacgatacttagccccagaatgcctatcataagacaaagcgtcttacgttttccgatcaacgcgttttgactacattttggttgttgtataccagtggctacattgcatattgtctgtcaaaacataagacagtttgtcggacactagtttgcgccatacaattggccaaaaatgttcaggtctgctcgccacgacagcggcatcgttgccgcggacgcggtggcaacgttgagcgccgaaacgatgcagttgcatgatgcggtagggtaagtagcctcctgttcacacacgaagcgatgtgcctgtagttggccgctggcagcaagcttaaatatcggcataatgactgcacgaacgcgtgcatgcagtccgtggagctgttccactcagaggtgcagccgttgaagggcacggagttacgatgaagtttgtagacgtagactaagagggacaaatagctcgtaacggtactacatgtacattttaatgtagtaatttttatgcttgagcgtacatcatagtagttgtgaaggcgaggcagccagggaacggtgttgccagtgggcttcccgagatcctccgaccccctcttacctaataattacagtccagcaacaaaatgcaaccacgtactctgcaacggcgataatacctagatattgtacctacgacgctgaggtgcggaggagctccacactgctgcgcgggcgctcggcgcgcgccatatcgctgctgggctcgaccttcggcatcggcgagttactcggtatctcctgcaactaagccactgcctgcagccatgctttttgtcgatgctacagcgtagactggtttgcgtatgcgccctctatccgaatctccatcttctatgtagtgttagtactttactgtagaaaggagagttggcgtggtggggtgaacgactgttgtcgttcaccccagtaaagcgaagaaacattgctccactacgggaacaaacggtcgtatgataactgtgctatgatgtccttacattccattcctggcaagtatatttaaatcttctagcaggaggttagtgcatggcgtcaggatcaaaagcccggacatttttcaagtgcgctgcctctagtatagggggcaaaatgcgcacacagatgaatcagtccaatttacgagccgagatgcagcaacactcaaaactacataatacaatattaaccaatgaaattgctacatttgatttgtcgtcaaactgtcttacgaatgctcgacacaagtgattgaccatccacgacttacagcaattcgtactcgagtacgatttatagtcgtgctcgataagtcgtacgagttattgtgctttgcagttattttgccgaccattttagacgctaaatatggcaaagcctgctcctaaatatgtgtgaaagaagatacacggcctgctaaaattatgcataaatccacctcctcatatatatatcgacttgggagggcctgtcagcagccatgcattggcccagtacaccaccgtccatgatccccagcacatccaccctcttatgcataattgccgtgtgtgtaggtgcttgtggataaaaaccgacagaattgcagctgcacagccacaattgcacttttgaaagtgcaattatggcacttttagcgtaattctaggcctccacccatttatgcacctcgatttatcgtaaatctagcaggcgatcgtaataatacagcaaatctcgcctcatattgccaaaatcattgcaaagcacaaatacagtctgaagtgccaaaaagtacaatatgtgttattataataaacctggcgagatgtgcgcctaaatacttttgtccaataaaaacagaaactacatagtgattatgtccaattaaagcgaatatgtggtctacattaaagagaagtcgcactctcgcaacactgccgctctgctggacatggcgagccagtcggatctccagcctggagtcgaggagatagccgcattcgtggacgacagcgtcttcactcagttgagcgcgaaactgggggacgcgaaggaaggcaacgagggagcactggagaagaagcctcttcgcatcgataagtatttgaaaaaatatcgcgacgcgggactccgggtctctcagaaagaatttaatggatgcttggaggtgaagattgggatcgtatacgagcacccagacgtgacggtcgatcttgcggaaaccattacggtcaagacgattgaagacctcctggcaaagtttgttccggaagacaaccccctcatcaccaagctgggtgaagacgaaatgattcgactctcggatgcgttcactaaagtcacgtacgtcggcaaggcccaagacgacctcgcagaatacctgcgggactgctggaaagagtacaaccctgcaaagtacaaggcgccatgtgtggcggttgtgcagagttccggcttcggcaagagtcggacagtgcgtgagcttgcgctcaaggcagaacgagaaccgaacttgaacctgaaagttttgtacatgtgcgcgcgtgtgcaccgatcgacggggtttccggaggctacgagtaagcttcgtgattcgctgtttgaccctgccgcctcctcagtgcaagaggtcgccaggcgattgaaggcgatttactgctatgcgaaagatcattgggcggacgttcagacggaatggctggagctgtttatcgacaatgcaactgacagttccgtgtgcggccaagcttttgaaagaaacagaaatgataaaggcgtccgattcagcatccgtaccggacacctttatccaaactacgggtacctccaccgtgaaggatccagatggcaaaatggtggttctggtgatcgatgaagcgagaagtctgctggctgaggtggatggcaagaagaacgattttcgtatgttgcgaaatgctcttaaatccgctaacgaagatatcggccccgaaggaggcattttcggcgtgctgattgatacgaactcgcagatctcggacctgacgccgcctctgttgttggacccatcttctcggaaatctggaggtagtttggcatcgttcgcgccgcttgtactagctgatacgatggacgcacactgggatgactactttgaagatgaagagataaacgagggaacccaagttgcggtgggagctgaagacgaagagaaaacgaaacagcaagaacgtgctaagatagccatgtacaagaccgtcgtaactggaagtgacggtcaggcctgggaggcgttgaggcgcatgggccgcccgatgtggtacagcacttaccccgatccagctcataaagttcgcgtgattgatctcgcggcgaataaactgctactggggattcccccttcgcaaaatgcgtacaacaaggataccatgtttggtgtcgcctccatgctttgtcgactgggtgttcgaccgcattcgacgtcggctttggcatctcgtgcccccgctgacttcatggcgattctcgcgtatgtgaacttcaaacgagagggttacgtcaccagctacgcttcggacccagtgctcgccttaggagcgatgaaagtgtggtatgaactgaaatatggtctggcaaagtatatcctgccgcaactcaagaacctccttttggatgaagcgttggacaccggtggagttggcgaaattggcgaaatggttgctcggattttgctgcttctggcgatggacacgtgtgtgatgggggacaaagacttttcccagtgctaccatacgatcgggcaatttgtaccggtgcaggatttcttgaacgtgctaacaggccacgaggagatgtcgatatattgtaaggggatgtacaacgcggaagataagagaccagaattcaacgagtggtgctcgaagtgggatggttggtacgtggggttcacccactttgtgcagttgcagctcgagccgaatgaggacacgctttggtttttgctgggacgtcaggctgcaggtattttcccccgtaaccagtatggagccgatttgttgatcccgatgtttaagaagagatccaacagcaggccagtcggtggggagactacgaggggtgaacaagaggagcatgaggtgttgatgatgttgattcaagtgaagaatcgtttcccagtcgatggtgggttttccagggcagcgacggagaaactatgcccctggtttgtgttcggaaagaacagtgatgggaactcgtcagcggggaaatctaccggtgaaattggtggggatccgaacccgctgagctccacggatgtccgtgataccattcgcatctacatgaatgtgcgcggtagaacgcgtgacggcaagttcatctatgccacgacaatgaaagacaatcttaagcccaagaagaaaggcaacgcctctgaggtgaaggaggagagtcagacgatcgggagtcaggcgaagaagcgggcgaagatcgagagcaatcctggcgtctcaagtgtgtcgagtgtctcggaggaggatcctgttttcacgatctgcctccgtttactcaacagggtcacctacccgttcctgagcgacggcgtggcttccatgctatcaaacatggtggagtctcagtatgacccgctggggcttgtggagggcgacctggactatcgcgatgaagatgaaaaacgaaacaaggacgttagttcgtatgcgaagttgtcgcttaccgcgaagcgcgacaagttgttgcagaacgcccgtaaagcactagcgtacgcgccgggtgacaaggaagaagagtgacgctgagagtgacgttggtggcagtggtgagggccactaggcgatcaaggtggcgagacggaaacatccaagaaacgagcacgtgaaaaccaagagggtgaagaagccgtcccactaaacgcgccaagtgatccaacaagacgcccaagcccacaccgaggcagtaacagtacgtgcctggtgcctgcagcaactagttttaactaccaacaatttgttttacttgagagtacgcagccacctccagtacgcttcaccttgcagtcttacggaagtagcacgtcttttgctgtctacgtcgtctttactgctctacctactcgtcctgcaggaacgggtattatagtccgtgcacccgcgcgcgtcgccgaggtagaacgtgtccgtgtcgtagtcgttcacgggcttgttgagttggaagcgccgcaccaggtccgggttcgagatgaagtggcggccgatggccacggcgtcggccgcgccctcctccacgatctgcacggccgactgccggtcgaagcccgacgcggcgaggagcacgcccttgtacgtctcgcggaactgccgcgccgagcccttctcgggtgccagcgggtcacgcacgtggtagccacgcggctcgatcaggtgcgcgtaggccaggtcgtagttcttgagcctgttcagcacgtacgtgtaggtggcgacggggtccgagtccttgtcgccgaagctgccgccgaacggggacagtcggatgcccaccttggacgagtccagactctcgaggatggcctccagtgcctcgaacaggaagcgcgcgcggttctcgacgctgccgccgtactggtcggtgcggtcgttgatgccgtcgtgcaggaactgctccagcaagtagccgttggcggcgtgcagctcgacgccgtcgaagcccgcgctgatggcgttctccgcggccgagcggtagtccgccacgatgcccgggatctcgctcgtctcgagcgcgcgcgggggcacgggctccatgcgtccttcgcgcgtgacgatcttcttgccggcgcgcaggacgccgcccggctggggccgatgcggcccgtgtggtcgtatcttacctatggtatgtaccgcatcgccgaagttattgttcgcacatttattaataccataaagcgcactaaacacttggtggcaatttggccggacttccgagacaacactaggaggattctggaagcaactcgggcattattttcaagaagaaatactctacttttgatacgtagccatgtatttaccaaactacgcactgtacgggactagacttgattgaaatttgtgactgggtttggcggtgctttccaatacaaacatcaagtataaaggatttgtattgacccggaaaaaaatcgatcgagttttctggtacatgttgctgaactgagcaagcccagcatcgctaccatgttgaatagacgccaatgaagacactagtcagctgacagcctcaacttacgagtatagacctctccacactgtcaaacaccactcttctatacaaattcaagatagtgcgtgtctccattgaatcttatcaaccgcgtcagcttaaccttatttgagcagcttactacagtgaagtgcgtcgataaggaacgggcgacattttatattctacgacaagacatgaatcctcgcttgtacccattgtgtgccaattgtactgaattagttatatgattctaccaatcattcggtcccgtttaacattccgccaatcacagttccgaaaccgagcctcaagagcggctggatggagcggctcccaagtcgggggaaatggaacctaaaggtcgcgagagggaatcatgagcatgaggatcgctgtgagcgcgggaatcgcgccaggtacatgtctgcatgcctcattaaccaactttcgctctgctgctcacaactcccatggtgaccgccacttccagaccgttccagaggtggctacgtctgaccaagcttcagtcgctgctaatctgtcatcgccgtcgtgatctaccgggtgctacctatgctgagttggctgcgtgggctcaagccgagactctggtcgcgaagtccgacatgaactacatagtgcagtaaatcagtgcatttgctgtctgcatgtgacgagtcaaacctttaattatcaatatacctttttctttcaatgtatatcaggcgttccttatcgacgcactttactgtaccggtaggcgttattcgagctgttcaatggagttagttcatttattacgcttgaaacagctctccacgagtttgttaccaatcttaccgatagcttaccgggtgcggctataattttgacccgacccaaagtcggtttttcgtccattgcaaaaaaacggttacagctttttcgattctgattgttgcatctgttttctatcgattttagacgaatcataagcagcggtttggcgccgaaagcacaatcattggtttaaaaaaataatttttggggtgcggttataatttcggcgcgcactgtatatcacgtagatgcggtaccgtgtttctggtacaaaactgagggaagaaaaatccaaccggccatttccacatttcccctccaagccttgtcctgtagcgccactgctgtgctgctgcagatggacatgtccagccagttggatccccaggctttggccgcgttcgtggacgacagtgtctttgctcagatgagcgggaagcttggagcagacgcatcgccgaagaaaaatcttttcgttacgtggatgctggaagactatcccaacaaagccacactccaactcgaggcctcccagatccagatacatggattgatacaggtggagatcagaagagcatacgggcatacacgcgtgtctcgacctcttgcacaaactattgcggccaagacggtgaaagacctcctggcaaagtttgtccctgaagcccgctccggcacgcccaagttggatgaaaatgaaatgaagcgaatcgcggaggcgttcaccaagggccggtacctcggcgaagcccacctcgacctcgcacagtatctgcgggactgctggaaggcctacacccccacaaagtacaaggcgccatgtgtggcggtcgtgcagagttctggcttcggcaagagtcgggcgatgcgtgagctcgcgatcgaggctcaaaagagcgccttgaacatgaaagtcctgtacatgtgtgcccgtgtgcacgagtcgacggggtttcccaaggctacgagcgagcttcgtggttggctgtttcaagaaggctccgaagtggaagacatcgccagtcgattgaagacaatttacgtctacgcgaacaagcattgggcggacgttcagaaggaatggctgaagctgtttaccgaacaggcagcggacacctctgtaaaggcgaaactttcggatgaaacagacacgctggagggggatacctccaccgagaagaatccaaatggcagaatcgtggttctggtgatcgatgaagcgagaagtctgctggctgagaagggaggcaagaagaatgacttccgaatgttgcgaaatgctctcagatccgtgaacaaagttatcggccatcgtggatgcattttcggcgtgctgattgatacgaactccaggatctcggacctggcgcctccgctgttgttggacccatcatctcggcttttcgatggagagttggcatcgtttgcgccagttgtgttagctgagacaatggacgcacactgggatcaatactgtgaagaaaaacaagccggcgaagatgaagaaatgaaagaggacatccaagatgtagatgaagaaatgaaagaggaaatactagatgcgggagcagaagatgaagaaatggaagaggaaactcaggttgcggtgggagctgaaaacgacgaagagaagaagaaacagcaagaacgtgctaagatagctatgtacaagagaatcgttaccggggatgcgagtcaagcttggcacgcgttgtgccgcatggggcgtccgatgtggtacagcacttgccccaatcctgcggatagagaagatgtgatcaatcttgcggcgaacaagctgctactggggattcccccttcgcaaaatgcgtacaacaaggataccatgcttggtgtcgcctccatgctttgccgtctgggcgtgcgcccgcattcaacgtcggctctggcatctcgggcgactgccgacttcatggcgattctcgcctatgtgaatttcaaacgagagggttacgtcaccagctacgcttcggacccagtgctcgccttaggagcgatgaaagtgtggtatgaactgaaatatggtctggcaaagtatatcctgccgcaactcaagaacctccttttggatgaagcgttggacactggtggagttggcgagatggttgctcggattttgctgcttctggcgatggacacgtgtgtgatgggggacaaagacttttcccagtgctaccacacgatcgggcaatttgtaccggtgcagcaattcttgaaggtgctacaaggcaagaaaaagctgccgatatatctcaagcggatgatcagcaaggagaatttgagaccagaattcaacaagtggtgctcgaagtgggagggttggtacatggggttcacccactttgtgcagttgcagctcgagccgaatgaggacacgctttggtttttgctggggcgtcaagctgcaggtattttcccccgtaaccagtatggagccgatttgttgatcccgatgtttaagaagagatccaacagcaggccagtcggtggggagacaacgaggggtgaacaagaggagcaggaagtgttgatgatgttgattcaagtgaagaatcgttccccagtcgatggtgggttttccagggcagcgacggagaaactatgcccctggtttgtgttcggaaagaacagtgatgggaactcgtcagcggggaaatctaccggtgaaattggtggggatccgaaaccgctgagctccacagatgtccgtgataccattcgcatctacatgaatgtgcgcggtagaacgcgtgacggcaagttcatctatgccacgacaatgaaagacaatcttaagcccaagaagaaaggcaacgcctctgaggtgaaggaggagagtcagacgatcgggagtcaggcgaagaagatcgagagcaatcctggcgtctcaagtgtgtcgagtgtctcggaggaggatcctgttttcacgatctgcctccgtttactcaacagggtcacctacccgttcctgagcgaggacgtggcttccattctatcaaacatggtggagtctcagtatgacccgctggggcttgtggagggcgacctggactatcgcgatgaagatgaaaaacgaaacaaggacgctagttcgtatgcgaagttgtcgcttaccgcgacgcgcgacaagctgttgcagagcgcccgtaaggcactagcgtacgcgccgggtgacaaggaagaagagtgacgctgagagtgacgttggtggcagtggtgagggccactaggcgatcaaggtggcgagacggaaacatccaagaaacgagcacgtgaaaaccaagagggtgaagaagccgtcccactaaacgcgccaagtgatccaacaagacgcccaagcccacaccgaggcagtaacagtacgtgcctggtgcctgcagcaactagttttaactaccaacaatttgttttacttgagagtacgcagccacctccagtacgcttcaccttgcagttcttacggaagtagcacgtcttttgctgtctacgtcgtctttactgctctacctactcgtcctgcaggaacgggtattatagtccatgtacccgcgcgcgtcgccgaggtagaacgtgtccgtgtcgtagtcgttcacgggcttgttgagttggaagcgccgcaccaggtccgggttcgagatgaagtggcggccgatggccacggcgtcggccgcgccctcctccacgatctgcacggccgactgccggtcgaagcccgacgcggcgaggagcacgcccttgtacgtctcgcggaactgccgcgccgagcccttctcgggtgccagcgggttgcgcacgtggtagccacgcggctcgatcaggtgcgcgtaggccaggtcgtagttcttgagcctgttcagcacgtacgtgtaggggttcgtagggaagaagctgcgcttgtcgaagccagacgccagcaagaccgcgaggatgcaaaacaacacattgaggccgtggaaaagaaagaggaagtagctcgagcggagcgtcgaggagaagaggccgagcgtcgccgacagttccaagcccgccttgagcaagaccgtgccgaagcgcggcagcgccacgagcaaatgatgctactgatctcgacgattcacaagaacaagtagtatacagcaagatgtgtgtgcaggaaggaagacgtagtgtattcaagttgcattatgcacataaacaaactcaactcactcttgtgtatctcctatcgtcctcgccatgaatgaatgtggttcgtatctcactaatgccgacggttctcactctgtagttagtaagcctgaaaatgttgtccaaacgctgctaccgtttgctgcggtcgtacggcaacggcatcagcagccgatggtagaccttctcgatagaccccataccccactcagcactctgtctaatcgacgttattgcccctgataaagccttcgccgccgcccgaacagaaggcaccagtgtacttgcatctccgtctttcagcggggtcatgatcctgccgatcatgtcaccactgcaagggaaagcactgtctgctacaaccccatatcgatcgtcaggattagttccgcgacaccagcttccgcctgaactctaggctggtatcgccatcgttccaggaccctggacagttatgtttagcccacacgatgagcccgtccgctgagaagcatagcgtgccggtgacgaacacgccatgtagccaaccgttgtagtgagcattctggatgtctctatctggaggctgctgcacctgtaaagtaaaagtatgatacgtagatggtaagaacacgaacaatgatacaatacaatcacatcttgacgaaagtaccttgtagtttttcccatccaaaaagccccatgtgaactgcagcatgggttgctttgctgccactagacgagctaaagctttctgcctggcgaacgtaggccatacaatccgagcgggcgcaaaccctcggagcgccgctgtaagagcgtcttcagctgcagttagcacgcgggtaagcgtcgtcggggggacgccaaacatgagacacaggcgccctcgatactcacagcctacgtagaaagctagaagcaagcccaacacctgatggtggtgttggagctttcgaggccgcccccctttcgagtagaagatgggaatctcgtaatgaggcgcaaagcgagatagtagaaggtgtaacgaggccctacatgtcaagctataacggcaaacaacagttagaaaccaactacacacttaaatgctgcatgtcgcccttaccgagacaggctcgtcacatttatcatattctcgtcggttcctttgagccaggtgtccatccaagaagactgctcaggctcctttaggcagtccagggtgatgtaatggcgcattcgagcgagccgctgccactcccagcgcctgcgctcgtcgtgcagccggcgtctcaagtctcggagcgtctcgagggagcgatgacgcgtctgggacgacgcacagagcatcagcagaaagctcgtatccgggcgagacattgtgctggaagaagcgcgagagaatgcgagggtggggggcaaatgactcggttgctcggagagggtcgacgcgacgtttcccgccgagcgagatctttacaattagagatattttgtgaaaatttgtccatcctcggattgtctcctttcgacctacataatgagattaaggtattcatacttcaagcggcaaaggtcgccggacacagataacttttaatggtggttttggccttggtgtttatcaccttcgatttgcagacgtttggtccggcgagtaatgcgcctagtcgggtgatcagaattcttcgattaaacttttttatctaggttttggtaggcgcccactagcgcacgaatcccccacgacagggggccagtaggcccatagcaggtagtccggcacgtgtcctctactgatggtgaagcccgagaacagagtgaacagaagcagcgagaggttcgcgatgggggtcgccacgttcatgttgggagatgcagctgccaggaagaagaaccacgatactattcgccgaatagcatgcacgtgaggaagaggatcaactcgaacagcaagtaggtagagtagccagctgcaatcagcacatccaatgcatgatggagccgaagaccagcgcttccagcagcgcgagggggacttggctcacggacgtagcgaggacgaacgacgaggtgcggtagaagttggcgcctcgctgcttgttgaagacttctcgcgtcgccatgaacgtcggcacttgcgccgactggccgagcatgacgaagttgatggacacgtacaagatgcccatgaccacctgcgcgtctgtctcatcgaactggcagaaggtgctcgcgttcagcagccccaggaagatcgccatgaggagcctgctcttcagcaacgccttgttccgcattgttatcttcatctgacgccggatgagtgtggctgttccttgccagaagctctgacgaaacgccggaagcgagtccacgtagtgcttgctatcttcgaccagatgggaggcgagaggcgcgtccaggtcctctaccgtgcgctggtagatgtctgactgctcgaatgcctctgcgaattggctggcagtcacaggaggagccccgacctcgtactggcattgcttattggtccccaggcccagcaagaagtccgccacgtctcaatcttgggggcacttgaagcccaagctctcaaagtaggccaacgcccgctgtcgaggacagtgatacatgacgtagccatcgttcagcagaatgacttggtcgaagagctcgaaaacctctggaggaggctgcagcagggaaatcaccacagtcttgcggaactttttagcgagactacgctgggtcgagacgatgtcgaaggttgcagcgctgtccagccctgtactgatctcgtccaacaccagcacgttcttgctgccaaacgccatctcccctgtcgtcacgcgcttccgctcgccgccggacacgccacgcagcatggcgttcctcacgatcgtgtcttgacagttctccagccccaaccgccgaatgatcacgtccgggtggtgcttgtacatcgctttagcagcctccaacgccgctgcattctcttcgcttgtttcatgtacgaactgctcttcgtcacgtgttgacagccccccgtcgttacattcgtgcgcgaattccagcgtctccttcactgtgagagtcgggaagtgcttgtcttgctggtcgacgtatggcacgagctggggcaggcgacgacgaagttcgtcttgcgacttgccgttgtacgtcacctcgccgtcctcgtcgagacggttgtcaactggaaatctcccgctcaggaccttcatgagcgacgacttaccggacccaggctggccgagaatgagcgtcatggagcctggcttgagcacgccactcactccacgtagaatcttcttctcgaccgtgtgcttcttggagctcatgcgcatgagtgacagtttaagtgtgttggcgatcgtcggcagccccgacgtcgtctccatgtcgtccttcaatacagtttgcgccgatatagtcacgcccggtagcgcacttccacctgcggcatgggcctcccgattgcagcttcaatgcgtgtggccaaatgctcagtagagccacttgccatcagtgattcgccgctgtcgtagccgatatgtggcgcgtccattgccttcttctcccgctcacatcggaagaaaccatggcggagtcttgacgcttgcagaggacggagcgagctggggatcttgttactagtgcaaaagtagaaatgaccaaggacaaacggagcttggagagaatcaatcaagaaggcgacaagttgaagtgactggccaatgaaaagcttaccaactccacccacttttgacacttgatctgcataatcgactggagacaagtgtcgccctctttctctcgtgcggcccgtataattttgcagggggtcgttgcaccgcttacgcattgcgttttgctaaccttctggcccgcttggtcgtcgttcttcggtgttgcgtgaagtggggagagcggcaaccgtagcgtgagtggtgaatcaccactggtgatgtggtgatgtcaatgtaaactaagtctctagccactccacacacgttgctgttgtaagttttcaacttgtaacctaattacaacaacaacaaaactcttccgttgatcgctcgttggttgtggccgtagagtcgatgaacgtatagtatagctcgggggacgaacagttcgtcgcggatcagaatcacgctaaatagattcttcgaagtaaatgcttgtttgaataagatgagagctttttcacggtaatttgagttcagaccgaaagtaatatttctgtgaggttcgatacacgagaatgtaaatacaactgactcggacggtaatgctcaggcctccacaagtagaaaaatctctcagcaacggatcctccatactaatgtaatgtattacgttttcgcgttgccacactataacctccatactacacatgttttaatattctcgtaaaggtacacattgaaaaatccgtatactttactgcgcaaaaagcttcgtctcacaaacaagcgaatggaggacgatcactggcacttcctgctgtcctggtgccagcacctctcctggcgtctgcagtatgtgaaaggggcgctcgaagacgacccagagctgcgcttccgtggtatcgaggtggaattgccaactttcggcccctacagcgacgacgaggggcaggaagaagaagctgaagacgatggcaaaagtccgtgtcaagacctccgagaggctctggcgctgctatcagctgtggcacacgtcgacaatgcagcttggaagaagctcctaatcgaccatgtaaaactgagcgtcaacagccaagaggaactattcgaggagggggaattcccaccccgattccagcttgcactggtcggcggcggacctgacggcgacggggagctgttgaggggcatcactgacttctgcgggacacagcagtacaccgcccaaagtgataaatacagggaagctctggctgcagttgcagctctgaacggcgagaaatcgtgcacggggtcgacggagatcgaggtcccgatcacggtgcagttggggccgtggctgacgaacagcagcggcgaaatgttcgcttatctccggagggtgcaggagacggttaggaacattcgcacgcaatggcaacagggcttggatcggacgcaaggtcctctgagtgtggcgttcgtcttggagtcgattagggtggatctacgggacgtcagtatcagtgccgagttggaggagctagtggaaagcctgccgaaagatggcgtccgagtgtcggctttcgcgttgaggcatgaactcagtcaggagttgacatcgaatggcagcttagcagaagctcgtaaagttgtcagcagactcacgtttggactgtttggcgacgcaaagaagctaagtgggtgggaacattttgactttgaagcgaccagcatgactgggcctttagtggccgagtacggacacgcacagcagctcgctctcagctctttgaattttgatagtgaggctatgcagaactgggtcttcgaccgcatttgctcggctattgcggttagccagacgacgaagcatctctcgttggacctggagcttgcagacggagaggacgacgacgatggagactgggcgctttgtcgctggaggtggcagtggatcgtctttgcctgcttctcggagaaagcgcgcctccattcgcggctcgaaagcctcacgcttcgcaacgctgtaattacgactgaagcggtggaggccatggcggaggtgctagcgtctgatgcaccagaggagactctgctaggcattgcatctcaaccgtctgatccagcaatggacatttgcatcaaggctaacttccctattaagttgctgccaatgttgggagcgaagtcttcgaaaggagcaattcattcacgctggagagagagatcagtggcgtgagaatattattcaaagatggcaagagcgattggacagacgtcttggtacctgggtttggcaagtgccaggtgcagcgctctagtctagtcaccagagaactcactcttccatccaacggacttgctggtgtcacgacgttggcgatcaaatttggcgaagaccgggacctcgaagtttgcaaggcttgcttcttctcatcggcgcttcgctgacgcatcttacgctcgagtttgaggactttaacacgagcgagctggaagggatcgtagcgagctgcccgaatctggtcgaactagcggtgtgcactcacaccatcgagctgcgcttctgtctgcgcgacatcaattaccgagacttggcgctggaccccgactcgcacgtctctttgtggtggggcatcgaacaactcgctgaagttctttgcgactctgagaatccgctcacaaagtgcgctcgacgtctgcgcgttcgcatggaccagaggtccgtagcccattcgtacgacgaatgctacgctgcgctgttgaagatgctggaaatgaaccgcacgttggagtatctggatattgtggcgcagcgctcgcacatgacgcactacaacgagttcaaggcgcaccacctcgagtcacttccgttggtgcggacagttctctctatggattgcaaggctgcgtttttgagcgtcatggtggccgggtatgggggcattgccgataacaagcgaaggaaacaaccatcaccgctgccgtcgcttgaccagcatgttattgtctgcattttcgactttgcagcgccatccgtgacgcgtcgagtgtacttccgagagtacgatttcttcgagactgcgcgtcactacgtgccgatttgatctctgtactacagtactacagagtctgtagagaaatttgggaactgtattgaagtgccgaagtactatctgtctgtaaatgtgcaatcaaaagaatttgtcgaccgctgcagactaaagctgtgtgtctatcgcttctgatagttcacgtagcgcagtgcaaggagcgacagcagacgaaggcccacgatccatgcaagcatgatgcgaagttgctccagatctgatcgtggtgcggcctccacgtactctttcaccgtgatcccatcggggaggcgtgcccgtcatctgccaacagccgcgtgcgcggccgtctccatttgtccgaagactatggagcaaagctgtacttggtaggtatatcggcgatcgtgctgctggaagcctacttcggacagtttttggcctacttgcagccgagcttggatgggggtcgtgatcatcaacaactttatgatcttgttctgaacatgatgaacgggatggagctggtcggcgggtgactgtacaacctcactatgctacggagcgttctggtactttgtgggggagacgctggtggagaccctgtactgcttcgcctattgcttccttcttcctcgctgtcttctaacccgatggtgggcttcactggtgctccagagctcttcacgcacctgtcaaccagaaatcccccgtataggatcttcacaagcgaagacttgccggatccaggatgactgaggacgagcgttatcgtgcgtggcttgagcatgccgctcactccacggagaatcttcttctcgaccgtgtgcttcgtgacacacatgtgcatgaatgtcagtttgagcgtgtggcggtcgtgggcagccccgatgtcgtctccgtgtcgtccttcaatacagtttgcgctgatatagtcacgtcccggtagcacacttccatctgcggcatggaccccccgcttgcagcttcaatgcgtgtggcctcgtgctcataatatgaacacactgctctacaatatagagcagtggaaccactcaccactatcgtagtcgatgtgtggggcgtccatttccttcttgtctccatccgcaccgtaaggaaccatggcgacgtcttgacgcttgcagaggacgggcaagttggggtttttgttacttgtaataaacagaagttgaaataagcaaggacacaagtgaacttcgagagaatcaagaagacgacaagtgggagtgcaatgaaaatcttcctaactccacccacttttgacactgatctgcatagcgcatgcactgcttcatcgtccgctatcgaaaattcacttgtagagagcccccttaattatactgtaaaaaggggtattaatctcgcatcgtccacagcagacgaattgttgtacaattcccaccgcaaacaagccctcttactgtactctctttcggcccctataataacattggacgcctaccaaaaacgaacaaatcacccaacatatttaaatttaagaaaacttatatttactcagacgatttttacgtctgagtaaacgaagggtcgctgcatagcagcgtattagatttgacttgctttcagtattgacgtccttttctagcaactaacgcatatatcaggcgacctctcacatatttcgacctctgcacatttgatatttagagacaaatttagagatgcattctatgtcgagtaatatccgtttttggtaggcacccattgtaggaggccgttgcaccgcttatgccttggacaataaccagctcccattcaccataatatccagatcaaacgaaatgatgtacgaaccatttggagttttcgagataatcgcgtttgaagttgaccaatcaaatttcgtacctaaccggacatcaaaaatttaaagtgaaaattactcgtagaaagcggaaaacactctaattcgcttggttttagcacgaactttccgataatgtacagcattaaaaaatcggagaaaaaatgagatcacacgccccatataaaatccggtatttcgggggtccgaaaaaggagatacttttttagaccagtgtcactcctcgagttctcaacattttcgagtgctcaatagctaaaagaagcacaaaacaccgttctttcgatatatgcggttaaatcgcgattcgtacttaggttcgtaagcgtcatttcgtttgacgcggtctcattttatccacgccgcagttcccctaattgctgtgttataatataatacagttgaaaccgggccaaacaaaattatgcttacaaacctaggccttaaccgcatttgtcaatacgacctattaaatatgttgtggtttctatacaattatggtgttgattaaataatcattatgtttaaataatatttcgctgcgaaaataatatttgccaagctggcgagacgctctatatctaagagcaagactttatgattaagcagataaaccgaaaacgtgctaggtttcgttacttccacttagacttgactaccttggagttctgtgttgcgcgcactgtccatttatggtaagcgcgttgttggtgcagccctgaacggtggaaacagggcgaccgtcgtgtttctagcccatctacttaccaaatgcctgactgatgcagccctcgacgtggcagaagcccgtgatggggaagtgcactcttgcgaagcctttcatttgggctttgctggagcacccgtcggccttgcatccgtcgcccttgtgcatgaagaacaggcctggggaccgagaaacccaagtgcatgatggacggatgcggtcttggcgcagcccttggacttgcaaagttgttgcggcgcgtgcgtactgcccatcccgcccctgacaatgtgcttctcgcaaccctcggccttgcatcttagaccgctaggtgggtgtagcacagccccctgagtcttgaattcttgttgcagtcgtcgacggagcacttggggcgcgtgtgttggtagcagtagaaactcaattgtgcgggttcgtacagcgctcttgcttgcacctccgaacttcactcggtttgccttcaatctgtatgagttggagaaggtcgtcgccaagattgtctatctcactggcggcatctgatgccatgaaattggcatttcttcacgactaactgcctgggcaccaccagccacttgagcacttccagaagcttggggactacgacttccaccgacaccaaaagcttgaagacatccagcaccgccaaaatcttgcactcttccagcaccgccaaaatcttgcactcttccagcaccaccaaaagcttggactcccccagcaccagaaaaggcttgaaggcatccagcgccagaaaagccgtgagctacgccaccgacaccaaaaggttggacacctccagcttcagaaaagaacacgctctcatcgaataggtcaaagagctcgtcctgaatcccaaaaagctgcttctccagaggtgtcaggtaattgtcttgaatcgtagcaatcttgagccgtttgacgcgttcttcctcctccagcggcttgatccggacgcgtatttcgtgctcgtccttctccagcttattgatcttgacagccttttcgatggcctattttgtcttgaccttgttgtactcttggagctgccccgcctccagtatctccttggatggcgcgggatattcttgagcacttggtaccggcgccttctctttgagctcgagcaggccggccgcttgcacgcttccaggatcggaagcaagctcctcttgtcccgcagggagccatattgtagatgtcgtcgccggtctgcatcatacccattctccagatagttttcaaagctcacggtctacatacatcaaccgttagcccgatggtcataatatatatatatatatatatatatatatacactagcaaaataaaaatttggacatattacacttgttaaattcaggcgagcggacatacaggatatcttctgggttgctctcggtcttgtaggccgcatcagagtagcaggcggatcctattacacgccgaacatcagaccacgactcttatagagccccatacaaatacaaacataaataacactcaccaaaccgaacaagatccatatcgaagatctcaattttgcattatcatgatcttagcgctgaaccggaagatgaccccagctgccaacactttcttggtgatgccggggtactcgcccgtcacggtggcgtccaggtacacaaccacgtagaccacggtcttgcgagcctcgatgagggcttccacgctatcgtcgaggctaaacacgaatacagacacaagacacacaaacttggtactctatctagacaatacgcaaagtggcatatcccattagcaagcacgtagtaaaaacacataaaatacacaaccagcacacaacgaaccgttttgagcatgatccggtcggctaatgccacccggttccggtccggtatgtgcgttttcagccacttgagcagccggatgtccttgtcgaacgggaggtcatggggggggggggcggagatgctcaggccagcgactgaagtgcgtgtagtcaccacagattgcctgtgtagtcgtcgcatattgcctccactatatctcgctccacgtcgaactcgacagcagctccgtcgatgtcatagtggagctccccgtcgatggggctctccttctggttggccgggtcgtccagctacagcattatctatatatcgacacaataatgagttaactcaaaacacacaaacatacatgtaagctccacgcaaattaacacaccgcacctgaaattccagcaacagggcggactgccacccgtcgatgatgcgcggggcgttgccggtgcccatgtcgacggcgatgggcctctctggagcccggggtccttgggctgctgcgcgtagtggatggaaggggagctcttggagctcgcgaggcagctccatagagcctaaggctcccacatcaagcgcatacgccgctgcgacggccttgttggtgtccgacatgttgcggaacttgcaaatgtgcttgggccaccgctgagtgcggaacggagtgatggtcgaagtgttgaagtctaagttgaagttgatgacaaatgaaatccctcgacttagtgtcatcctcgcaataatgcctacgaacccgtttgtgtgccattgagacttggctctcgacaactatgctggtggggcgctcgttcgtacgaaggcccgacacgtagctagcatacttggcagaacaggggtgtagtaccgactttatttagttataatggggggtggtacatttttgggtgagtgcttcctgcagcagacggcccaagtcaacaactcaggcactccagtaaattactatcaacttttcacttacctacatatattacgaaatttatttctgcctacggatcaaagtcattgtctggatcgatgatgccaacttccgtatccagaagtcctgcagcctggagcaatgcaaacacgtcttccccctcgtcgtcctctagtagagaaggcagctcacactgctgaccaatcgtgggcttgtcaataatccctgcttcacggaacccgttgcaaatggtaggcgttgtcatgtcattctacgtctcgctcatccaccgagccatcaatacacgatctggggctctcatattgaacggctgaccaggtacccggcggcaaagttgctcacgaatagacttgatccctattctacgtagcctatccttcagcggcttcatccacgcgatgtccgccggctgacaagcggacgtgcagtttggcggcaccttctccaaaaccacatttatgctttttgcatatgaggcgacttcagcggtccaatgtccgctgaagtcgtcccataaaagcaaaattcatcgcgattgccgcgattaccgaaatagtgccgcaaaaataccatagccagctccgaattgaaccagcccttggcgttgcaatgaatcgacattccggttgaggtttgtacgggctccatctcttgccacattccaacactgaatccgttgcgctcgcacttattttccagcgccatcgcaggcagtgtggacgggctgcacttgtagacaagcatcggtgggtacttagtgtcgttcgagtctgccagcaacatggcggtcaaccgctgcttctccttgccaccaccacgcacccaaacagtttttttgccgcgcttgtgaagggtctttttgggcaggtactcataaaatactgctgtttgatcagcattatagaccttcgagacccccaactcggccattttgctcttgattctgactgcaaagtcggctgcaatttttttgcgtcgtcaggcgcgacttgaccttggcgagttcggcacctcaacgacaggcgatgccgcttgcgaaacagtttttgccatgatggactagccgcaaatttgtccacgtgatattcttttgcaatttccaaagcttggagctgaagcatgacacttgtgacgggaacaccttcatttcttagctcatttacccatctagtacacgcaataaaaaataaaaataattttagcataaaccaaagaaataatgaatgtgatgaaagcagcacacttactctaccagttctaactccgctgccataggtagcgatgttgcgacgccagatgatcgattcttcttcttaacggcagtcgtagccgtcttacagccttcttcgatgatggcgcggttctgtttccactggtacacctggttctccgacgtcttctgcttggcgacgtggctgaagaagcgctggagcgttgacttgatgccatgcgtctcgtaccatttgatcacctccagcttctcgctgttgctgacggcggagcggctagtgtagtagtaaagcaaagtggatgttgtgaacgaagtacaaaagtaaatttccggcgtgcagtttgaatgaccaagataagttgtgtatagtgctacgactttatctgcataattgaccattgttcttcttagcttaggcatgtttcgctagctttcgtgatacttcttaagccaagtccgtctcgcgaacttcgtcgacaccggcgagctccacttcggcaggatccaccgctttgctgcttagcactgacttggcctccgggtcttcccctccgtgagcttgctggcgcttacgcaagttatccagcgtcgtggccgacggcgcgtacaagtagcacagcgtgtacacgtagacgttgaaaatggtttggagcgaggtccacgcgcctccgctggacggggtcggagagaacgctccgttggccagacccgagaacgaggcgatgatcatcaacagactcagccccaccaagtaccggtagcgcatacggcgagctcggatctccttgacgctcataacgatcaagatgcagtaccacacgataaacgcagcgctgagaagcccacacaacaccttaagcagagcgaagttgctgttctcggccagggggtcccacgtgacgtcgttgttgcggttgtacttgatgtagccgtagtaaatggtcatgatgagccagaagaaggccacgaagaggagcttcggcgcgaagaagcgagtattggacacaccgttctccttgccttgcaggcgcaggttgtcgatcgagaccagccagaagagcagcagcatctggaagaaggtcacctggaagcccacgctgaggatgcgagccgcgttgctgccgtacctcgcctcggccgcgtagaacgggtcgttgaacagaatcagcgacagaaccagcgccatgacgaagccctgctcgacgttctgctcgcgtgacgacagcttgttgacgctgaagatgtaccagccagcgaagatcgccgagaggaagaggaagaagagcttcatgccgatgagccagttggtgaacgcctccgtgccccaagtcttgcggaactggacgtttgagccgttcagggccaagttctcggtggagttcaacagcacgtccacctggtagtcgttgaagtcgatgtctccgaagcgcaggaagtaggcggcatcgcagtacgcctcgccctcctcacactcgaccgtgacggtcttctggacgacgttggtgatgatgtcggcgtacgtctggttgccgctggtctcgttgaggtagaagcccttgacgtgtggagtcatggtgacgtcgaaagaccgcgcggtcttctgcaggttcgggaacgcggcctccaggtagaagtagcggttgagctgcgtgaacccgttgaggccgaacgtgtagtggaccacgtgcagactctgctcggtgctcgcgaacggccggttcgtgcggttcgtgcacgcgtcgaacatgcagctcagcaccgaccgctgctcattagtagacagactcaggacctcgtcgatagcggacactgttccattcgcgtccgtgtcctcgacggtcgtcgtgctgttagtggagttgaggcattcgttgtacaagctgatggagaagtcggacgtgcagcgcgtggggatgctggtccagtcggaattggccaccgctggcgaaccgctgaagccgatgagcacgaagagagcgaggaacgtgactgcgatgcccgacacgagcagcagcttcagcatggaaatgacctcgatccgcatgaagctgccgtcctcgccccgctccgcaggtttcgacttcattgtttctttggttacttcgccttgttgggcgatagaaaacttcgagtcgttggaaaagcgaaaatggcgtcgagactgcacgcctgcgatggtgatcaactaaataaaaatatttgtccgtttttctccttcctcacttgttgaaacccctgcgccgatgcccttcaggcaacagtcccagtaccgctacttgaagtctaagtctagttggtcgatgcattgcgctaacagcctgaaacgaatacgtgttgcggaagcctagatattcatgatgctgctcactcaggcacgaacaagcgtcttggcctagaccatcgcagtgctcacagccactgctgccgcccaacttgcgttcggagcttctggaggatctggaggcgcctcaagtggagctactcaaccgcttcggctgaaagtccgtcctcgcttctcgtcatgatgtccagctccagttggattccctgcgccaccactttcttgagttcgacttcgtctgccatggatggttttgctcgttgttgagaaccgtcaacgtcccgtcgtggcttcacccgccgatcttcagctccttctgcgtcctcacgtctcgattttgctcgcgactgtcgagcactcactttctcgactgaaaccgcgtgctgtatgatccgagggctcaaaacgttctgccacttctcgtggttcacgagctcccaggccgaatcccagtccccgaacctcttgttcttggcacggaccgcagccttcgcacacttgaaagcctctttccgacgcgacaacgcgtaccggaggttgatttggcacttgctccacttctccatgaacagcgttaggaactcgaccaagtgtgggtgcatctcctcccactgcacccgaagcccctcagccgtcttaagccgtccagtcaatggcaagttgtcggcgtagtcggattgaatcttggtccagaattcttgcgagtcttgtgcctcatgagtcaaagccgcggcgatccatgcactggtgagagccaaccgctcctcgggattgaagtgtgctgcagcagtcgtggaggtcgtagtaagagtcgaggaattggggtccacttggttcgagtatggggacaactcgcagctgaaagcctcgtgtggagtttgagttccgcgcaccaatcctcaacctccgtcttcatcgtctttgacgtgttgcctccgtgccgtaagttttgaagtgaatggcagcaggaggcgaaagggaagaaggtgatttctttttagtgggacgaagtaacgtgggtgacgtgtttagcgttgagctcaggtccggcgatttcgccatgaagtggttgaatgccagccgcgagtttgaaaacaaaaacgaaaaaaaatcacgtgccaaggttcctggcagttccaatcaagaagtttatataacgtaagagcgcgcaaagtacaatagtgacagcttatctagtgatatagtacatgcattgtggctttcatccgttttggcaaatcgggtggtccaagatccgatatatcgggcccgatttgctggagggctcacatttagtaggaagggttgagggaagcaaactatatctgacccgatttgcgtcgagttgcgaagtaggggccagaaatgccgcttttcgccggcaaaagggaccgccgcgaaagcatgtctggggcctctcagatcggcggggcacgaagttgcagcggccgtagatgatcacacaggtaatttagctggccatagtgctatgaagtggctatatacagtgcactattgtccccaacgtattgcagttctaatgcgtcatgagaggtggggaggtatggccaacttgaaatgccttccctctgagccttatgctactaaccgatcatgtagaagctccattttatataaatcggactccgagataacacgtcaaatcgggcggcaaaattgttgaaaaccacaataaccgcgggcgatatctcccgtgagtcacgggagatatcgcccgcggtattaccggccgtgagtgattttgttccccgagtgaattgtctgtacacctcgataacgattcgttggacgcggcagtcctcgctgagagttgttgctgctccagactgggaacacctggtttcggtctgtacaccttcacctagctagccctaattgccgttttgcatccgaccagcgtatagcgtatatggctggccgataagaatagtttcgaaacggagcgcgaggggcgcaaggagcgcaaggagcgcagcggagcaaatggggcggattgcaggagaccgggctgcatcatcgggcggcgtcggcaaggattgaatgtggcgctccggagaaagtttgcgatagcagcggagaacgctccagctctaccgcccgcgacttgtcgtgagcggctgggcatctaattgcgtcggagtgtgatcgcgacgtggcctccggaagagggctgtcaaggtacgccgacgtggtcgctttactgattgggagattgagggagtcctggctaaacgtttgtgtcttgtgccagacggctgaagtgtatagctacgacccggcccaaatacgagcttggcggcgagtgctccaggcacacccagaacagtccacaggacctgcagcttgagcaacaaggtcttacaacaagagaaacaaatggatcaacgccgtttattagagtgtcagtcctctcgaccaaccaagtcgtatgaaagcatcggtctagctgtctttgaagtagtccgcgtaatgtacgataatcttcaagttgttgttgtggtatcctacagttgtccacgtgaaaaatagtggccacattctccggtttcaactcgtccttgtacttccatttcctaaacagcatggtcagtactttactgaaaggaagctcaacaccggagtgggcaacatcctggagaacccgacgtttaaaacttacagaagtacattgccgtgtacaacaagaagttcccagacagtggcgtgactatggttgggtcgctcacggcgcgctacggagacgaagccgttgcgcgcgcactcgaagctgcggctaaatgaacaggcgaagcaccctctggctggctatactatcgaggcctggcggagctacctggacgtgttcaataagcggctgctgctgcgtcaagcaagtaaaattgacgagctctcggtattcagagaggcctacggggatcgcgggttggcaacaacgcttctgagggcaaacggtagcagagaagcgcggagtagagccaacgttttgcagcgggcgcagtttaaggactggtcagagaaacgtgtgcgccccgaggacgttctcacgaaactttacaaggtggaccggattactagcgacgacaacatggttgtggacgcgtatataaagtggcttgcaaacgaagccaagaagtaggacaacgagtactggtcaaccgagcaccgctctgtcgacgcgtcaactttgaagcatttatcagagtatacggcgactagagatctatcgagacgaaaactagtggagtgccacttcgcaaagctcaagtctaatgaggtgtccttcgtactttcagcactataaggtgatcgtgtacttcaatagaagcgttatcgatagcttgcgacggcttttgtagaatgtgatacatgcattacagtagcagtgaatactgatcgacgaagaatgcggatgaagggatgaggctagacgcttcgaaaatacgcgctggaatacgtggatacatactgacctactacttcgtatacctcacgagactttcgtagcccgagtgctgtcgttcccggcaccagctacgagtgtccctgttgtccggcttgcagtcggactttacgcaaaatccgggagcgttgcaaacgaagatactcgaccgcctcggctgaaagtccgtcctcgttgtaggtcatgatttccacctcgagttggcgctccatcacttccagtctcttctcttcggcggcttcattcagtcgagatagactggcgtcagtcgaatcagcctctgtgtcacttcgacgctgcctcacccgtcgaggtggcgggtcattcgcggcggctccagcttcttcatcttttggttcttcacgcgacaaagcactcagcttgttcggcgtagcagcacccacttcttcggagagatcttcgtctggtaccagcaatggcttgacgagcgtgccccattttgcgtggttcacgagaagtcttaccgtaacttcgtgcgaaaatgggcgcccatgttcctcttggaacgcgttgcgcgcagacgaaaaggcttcttcctgagatgcttctgcttcttgactgctcaaacaggagcccacccactggtcgcaaaacagcgtgagaaactcaaccagactcggcagaattgagagccactgcgcgtggagttcatagacggatcgtgcccgctcctctgttccggcaccggagtattcatctcgaacccattcccagaacgagcgaccgatttcatcatttaaatctttggcaatctctcgggtcagctgaacatcatcatagcctgtagactcttcgacgaccttgatccatgcgcgactcaagcattcctgttcagcaggagtgaagtccgcttcggaagacgtcctcgcggtcgtgctgacactgtgagtagagcttcgggtcttgcgcttcttcccacacatagcgtcggcttgcttggttttgtcggaatttgccaactagtgccaacttctcggctcgtccttttctttcaagagatttcttggtttaatcgttggcaaggggtgagttttgcagtgcacctgcaccatgcagcttctgcaaatgccgcattcgtcttctgaccgtcagtgggacattgcacccacgagctgctttacactcgaaactagacttttgaaaaggtcgatgtgtacacggagcgccagatccgaagtggcaaccaagaaacaactggaaaagcccaccgtatcgtatcgctcgagctggtatgggttgtgatccgagtcttctgcattgacgagttgatcacgagaagtgtgtttgcatggggcaaccaaggcaattgtgcagatcgagttcaagttttttttctcgtggggatgatattcactgtcaggatcaaattgagataatggcaacagaggccactagcagcgacgcaaaatgcttggagctcgctcgagaggaagctctcacaccaccagtgatcctggcggcagctggaactgaccagcgcaaggaaatcgcagctatcgcgtcaggagccgaaaagttacaatacaggaatggtcacgaattaattaatttacttacttactcccgcgtgtcttttggagaatctgctgtctccgcacgtgcaagtactcaaccgcttctgggctcaagccagcttcactctgtgtcatcacctgcaggtctgaatgattcgtgatccattccagccattgcgccgacaaagccgcttgcagctatcgcgatcagcgacttaatcgaaggcggggagctggggtcgagagcttgtcgacacgttgctgacgctgcttcagctgaggcggtgccacactcgtcactcacgggggaaacggtattcggctcttcagaactctcacatgtagtttcgtcgcattgatccgtctgtcccagagaagaagtccccgatgaaactccaggagcgcttgacccgagaatcaatggccttagaacgctttcccagtcagtgtgacgctccaaaacctcctaggctgcacggtgctggaaccagtgctcgtgctgagtccaaaacgcctcttgtgcgcgtagaattaccacttcgcgatcggctcggcggacgtcagccttcttcgctagctctgcctcatagagtaagtgaaatgcagcgatgcactctttgattctcagccactcgtccttgagtacgccatcgatgtcgccgcggcagtcaggcttggccaccagatcgaagtagacactcgacaccaagaaccagaaccacttgttcgactcctccaacctcggcgacatgtctgcacaactgcaggagacgtcggcccacgccagcgccagatgaacggcttccacacgttgctcagtttcctcgtcttgatttggactttcagtcgctaattctttgcgttctctccactttgaacaactcccgagggctgctgatctgcggttggcgtctcgtttccagagccaccctgagcatcctgccctctaacagctctcgctgtttgaatcactctacttcgtttcaccggtttcttcccgatgcctcgttgtgtgctgctggaatgcgtcggcgtcactactgcagctgccctcacctcgtcaacgcagcctccagcatggcgctcttgggctccgcagcccagctcctctgtctccagattaccaatcacttggtaacgagcttgcgagtccccttcattcacctccacttcctctgccgaatccacgtattgatgtaccctatggggcgccttcttccggcgtttggcacctgatactcgctgcttcttgctcgagcccagaacagcgctcgaacgtcttgctgcactcgcaccatccacttcttcagtctcacgagtacgtggaaccaccttcccctcatcgtccacaggtgcgtctccgtggccacgacaatgcttctgcagtgtcgtcaatgctgctgcttgtttgcaaccccccgcagtcgcagcaggagcaggagcagcaccattctcgacttcctctcgaagcaccaacggcttcagcacccgctcccagtctccgtggtgcgttagcaggttccacacgtccaagaggtcgaagcgctgccccgtcctctcctggaaggcgtccaccgctctctccagcagcttctggtagtcccgggacggcagcgagtccaaggtcgtgacgggtccattgggccataactccgtcaatatggagtggaagtgcgccacactcggccgcatgccttcccatagctgtcgcagtgtgtgggcgcctttgctttcgctggagtgcagcgccttcgcgttgtagccttggtgcacccaggaccagaagagctcggcctcctctttcgagtactggccgctgccgggacaggacgacgccagcagctccggcgtgagcgactcgatgctgcacacggcgctggcccacgacagcgcgagcgccacgaaggagtccgaggcccacgggatgggagcgcatcttcctttttcgacgccccgcgcgataaaataacctatctcagtggctcaggttgctggtagagggtgagcgaaacaacttgagccacctccaaacccggatttctatggagttgtacagattggctcaggttgctcgttgagggtgtttgtccacttctaactgcttctaaacacttaattagaattcaagtccaaactaaactatggcttcatcttaccggtaattgaatctacagttctaaaatagaaatcctagatttcgtaatttaattagaaatttgctaaccattaagaatgcacccatcttctgaagtcgtaacagatggatacattcttaaccttacaacactgttctaatttagggctcctaaatgctgtggatgcctactacaacgaacggcgcttcgcgggtggcctccactatcgctgtggcggtaaaggtcgcaagtccgtcattgttttgctaggtttttagctgccccacgcgctgctgtcgcccaccaccttgtgtactcgttcgttacggcattgtcgagctttgtaagcttttcttcggatttcatcctgaaaattttcggcacaacttcatcgggggcgattttcctcgaaatccacgagttgaagagctcacgctcgaattccatcgcaataagacccgactcctcgtcgtgtttcgccttttgaatcatcccggcaaagtcacgtctgccaaagaccttcttcagtaccttgaattctgtggtcttggccttggcttcggcgtgattgttgtaaacattaaagtagctacgccaagctttgtaaacgttgcccttgagcgggttgtacgccatgtcaagctccagtttcccgaaaacaccgccgtaagaggcgctattgtgccaaagacggaattgctcggcctgcagcttctccgccagcgccttcgtcttcggattggtagagctcatagctgcttcgagcatgcccgccagagcatggtcgccatacttgttggtgagggtccccaccaccgtcacgtcactttcagggaacttattcttgtagcgggcaacgtacttggtcagtttcttcagcttccgtcggttggacaggagatcgtcaactttgtcgtcgaacttgagaagggcaagcgcgtcgtccgcggacttcccctcgttcagcagattgcgcaggtcgaatttcagctggaccttggacgccagtcccgtgattgcgcctccgattgcgtctccaattgcgcgctcttcttcgtcgtcaccttccgcccggttttcattccgcagcattctcgtggtcggagcatcgttcttggcagcaataaacgagtgggcgatagctggaggggacgtctttgcggctgcagcatcggcagctgagaggaggacggcagcagccagcagtgcgatgataccgtgaagacgcatttgcttgcttcagcaaagttcaccctgtgagttttggggcgcaaaaggccgaatgaataccaaaaaggctttggcgaggcggctgtgtgatagactcggtttcactgagtctcagtgagactgggcacctgccgtacatcccgtatgctgtatcattgggaaggtgacccaagcggaaaccatacaatttgtgcaattgtgagctgtactcttcacctggccaagcgattcgtcactatatggcccctgagctcttgcaagttgcaaccaagtggccaagggcaatcaactcatgactgtgatcaatgcactcactgctaaagtaaagttggacgcgagattatccgaacggaggacgttcaaaatatagcactagactcgggagatatttgccccaatgccgtaccttatgcagctacagttggcgtggtttgacgctggggtagtgctcgcttagccagtcgaagatgttgtcagaagggaagtctgcatccggctcgtacatgtccatgaagacgtcgcgctttcgggtggcgcggaaggcctcggtcgtgcagccttcccggcgctgtgagtgcaggaacagcacgaggtcgaagtcccagaatctcgctgccaagtccaccgcgaccttggtgcatccttcgatccgatgctcgtgcaaccactgaaccacgtgcaggtgacccgcagccactgcttcctccatcgcgcggatagtgcacccctccgatcgattgtcgtggaaccacttgaccaccgctaggttgcccgaagcggccgcgttatccatcgcatgggtcgtacatcctcccacttggtgattatgcagccacttgataatgtccagatgccctagagctgctgctgcgtccatagcggccgttgtgcagccctcggcacggttcatgtgaagccacttgacgacttctagatggccttgagctgctgcgttgtccatggctctggtcgtacacccttccgaccggtttgtgtgcaaccacttcacgacttcgagatgcccgccactggccgcatcatccatcgccagcaccgtgcacccctctcgccggttctcatgtagccattgcatcacctcgaggtgtccctgtgcagcggcagagtccatggcccgagccgtgcacccctccggtctgtgcgcgtggagccactgcaccacatccaaacaattgtaagccgccgcggagtccatggcattcgtagagcccgttggccccgtccccagtatagcccggccgctagcgtcagtatagtttcctcgggccgtcatcctgaccgatatctggtgcaaatacttgaccacaggaaggtgccgcgctgctgtatcgatcaaatgcgggcgatggaacgggttccagcctggaggtacagcggcaccgaagagatcgatctcagcgccgaacgactccaccagccactccaccagatccagatcccccaacgcgaccgcccccgccatcgtcttctccgaaatccacattggcgggtctctctgcatccgcagcatgccgcgcacgggggattcagtgagcgggtagtatcgctgctcgcgaatgtgtttccagtatcgagtataaagacgcttggccatatccagacatccaagcctcgccgccgcttcaagcgctcgaccagcttccagcagtttgttcctgatcagccacatgaccatgtccagtcgacaggcgttcatcgctacccacaccgcaaggaaggcgttgcgcgcgtagccgttcttcagcagccacctcatcatactcaagtggcctcccagcacggcttctcgcatgaagtcttgcgggctgccacacagcaactccctggcgttctcgccgaccatgagcccctcgcggtcttcttgcatgagctccatgatgttctccattggcgcttcaggctcccgtcccctcattcctgctgcaacacgagcggcgacagcttcttgcaagagctgctccaggttaggcggaaagagtcccccagcacctgcaggctgcgcgccttgctgggctggcacgactgcagctacagctgcagcaggaggattgccccttgcctgctgaccaacgcgcatggccaagctgaacgctccaaccattgtaaccacagcagggatagctgcaccagtccccgtagtggccccttcagcgttcatgcgtatcgggatgaacagccccatcgcaagccgttcgatctcctcctcctccctccgcatcatgtcgtccaagtcgtcttccccatcgccaagcgtgtcaaactcacgcgctgccacgcgggtcctgtactcggcacagaaccatcggagcatcttgacgtctccgttgcgcactgcgttgaacagcgccgcgcggatgcagcgcgggacccgcggcgtgttgtcgtgtagccactgcaccacgtgcatgttgtccttcctctcggccgctctggccatgtcgtggcgtccccagcggacgacgttgccctcttgagcctcaacttcatctcgccccgctctaccgccctccatcttggcaggaagctcgtgctgcttgaagaactcgagcagctccagcttccccgctgctgcagcctcctgcaccgccccaaaaggcacaatgcagccgtggaagtgcgcatagagccactgcgccagttccatggccttgtcctgcttcacggcctccacgatggcccgacggaactggaagcgtctgtagtgtctgtccgtgcgcaggaacttcctgcgggaccagcggccgccgttgccggggcccagcgaggccggggacggctccgtctcgggcgcagagccctgccagatgtgctccagcagcgccgccgagttcatcttgcacgcctgccagagctccatctccaccgccgagtccaggaaggccgtgaccgagtcctgcacgagcgacgcgaagatggcccgggaccgcagcacgagcgtcgcggccaggaacggcggaggggacggcagcgcggactcggacgccatcacttcgctgcttcttgtgcccaaggagggaaattcggatatgtgtctgagggcaggaacggccaagttgaagatgttgaagttggctacgcttggtttcactatggtcgagtgtagtgacgaattacattccgccgttcgaaataaaagccagagccgtatttattttctgccgctggctccgtcggtcccgaaggacagcccgactttcgcgtgacaaaaagtctagagcttacgtggtagaattcaggttttggtgcacgattcggtagctctagcagttgtgatgttgagagatcatgccttcctgcacctcgaaagcaacgtttggacgtgtgttattgattgaaactgcatgtgtatctgggggtgctagaggctaaatgccagctaatgagcagtgtgttgtgggcaaacattcgccggcgcatcgaaaacactgtaagttggcttcgagattagaagttactagcgcttgctggtgatggtttccgccccgagggcatcatgggcgcaagactcacttagaggtaaggaggtgattggtagtgctacagtaatttgcctcaatagcgcaatggctacatgtatacattatttaagataattgcataggagaggctagcgggactcccattgggtggatttggggtatagacagctacccgtttcagcaggttattggatgtcacgactgcgctattgaggcaaattactgtactacaacagggtgatctccccgccatcaagacggatttgccaataactacactgcctacggtaattagtctgtgtgcggaaatagtctatgttcgaaaatagtcttggtcagactatttattgtactggtcaaaatgtagaattcataattagtcggaccacttcaacttcaaaattagtctagtcttagcaaaaatatagtctaggtcagactatttattgtctaagagcaatgaaccattcgatcaaaaatagtctaggtcagactaattaccgtaggcagtgtagcgcaacaacttagtccatttatattgtggtagctagcaaaacgagacgttcattaagcagttaatcaacttcttcttcttcaacagggtgatccagatgttccttgaaggtgaagcgagcgacatgggaggctatcaatgacagcgacattagagcaagcttacaagccgaatgcttgcagtgcactcggacagcttaggctatgatatcgtagcccaagtaagatgcgaggcgttcacaatgtacagcaatcgactgagtgtaccaacatgtggggcctaacacgtactactggtagtacttttgccacgcagctttagtaagtccccacgccacctccagcgccgtcgccacctgaccacagttcgacggacgacaccatcgccaagggtaagtcgtgcccgaaggccctgcgctactatgcagcaatacacggcgaaaccaccaagctagacccggaggagcgatgcccacgtacaatgaggaggaggtggtggtagggggggggggggggcaacgacctcttcgaggttgtcgtgctgcgatcacagcggaaacattgagcggctacttcatcactgatgaatcatgagcttgctcccatgtgtactgggcggtcgaagctactgtaacaacttgccaagtcaggcatcagcgagcagtagatagtctagcgtatacattgcttgaagctatgctttatttagcaccagatggacgagataaagattactactataatactattagtattgctactgtagtattgcgtacattttctaaatgtagattgtacataacaaagccgtgctctgcccggaacagctctggattttacgttgctcttgggcatataaggaggaattactccagcttggtagctcttgtaaaaagctatgcaagtacttagtagtagatttgtagccatgagttatactgatttaagctaccactatgctacgcaccccgcgcggtcctccgaccttaaacgctcgctacgcttacttggacagatgccaggttcaggagtagagcttcagtttggacagcccagccggccaaggaaaatttttactacgagagctatgcgtaggctgggatagctaaaggattttgtgtgaggtaatgccacgcgacaattctggggaaattacgaaaaacaacaatttacgtagctgtgggtgcgttcaattctcgttatatatttatttcgatagtgatagggaggcagcgtgctgtaaaaaaaaaacgaagcgttaacgtcctggccgagctcgtgcaatttaggcactgaccggtagcgccagcgagaattcagcgcgttgtagacaaggtctatgttttcataaggttgctgagcattgtctgggagaccatttttctactagtatttgttttatcctgaaagtgcaagttctgcattagttgttctcagacagatagtttagaagaaatactctcagatgcagtatgccgatgtgacagaatcgaaaactatacttcgttcgaagtaagtaaagtgaacgcgtgtgcttctagtaggcgttagtatagaacccgctatatactttagtgtccggtacagtggttggcgactacttgtgcaactgcgcgttgggggttaagccacaactctatggacggttctaatagtcgaatgcaggcagatactgcggctgcaaagcaggcgcagaagatgcctgtggatagcggttttgccagcacaaggtttgatataacacaatattccagtcaagaagcgcggttagtggacgataactacggccatctactgcgcctgcttcgaagccgcagcatctggccggtaatacatgatagttcagtgagaaatgatgcagtcctgtttacttttaaaaccttgcaaacaattattttgctctttgcactctcgctaattgcgatttcgatgtctcctgaacgttacctgtaactgggaatacatttcgtgacgaactaagggttgtgaggctggtacttgtaagccagcaagctggtctcccaggatacatgctctagctagatgaagcagctatgagcagatagtatttcaaacacgcaccgttatggatcaatcaggaaccggacgatgtcatccgattctttcgcttcgcgccttgagctcaggacgttagagagcatgtctgtgttttcaaggtaatatagttagtttaaattacttgctcttgtactgtagatggacgagctgccacacgctgccacaccagatcggcaaatagttttcatatatgctgtcgtttgagaggccgaccgtcggcctaacggctacacgattagctgacgttccttgagttgacgatgtcggcgtcggcactatttccggggtcggctcgcagctgctggggcacatatcggtgagctacggcaacaagcgtaagctaagaacatcgctcatcagcgacgtggtgccgaagaccggcgagcagcgctgatctcggcaacgattcctcgcagcactcgtgtccaaatgcgacgaatacggaattttcgaaatgctctccatcactctcgagcttgtctcggacttgagattgatggagagcataggcgatattcagttaacttcagttaccgagccagtttttcggcttcagtattaccggcttcagttaccgaggtgccgccaaagtaatctgtgttgggctggccacagcactccctccggggttactgctatcccagaaaaaggaggcacctagaaccccgcttttctagtttgtagtggtgctatctaattgcgcggaccatgtatgttgcgctgatacgaagagatcgctaggtgataatagtatcttatacagtatacatgcagctctatgggtgtatgaaagcatcggcacggcaactagcttacgagagacaagtatagctagcacgacgacgggcagatgagggcattttgtctgagtgtcggcccgttcggttgttctgcagcgaggtaagtccagctggttcggtgccacaccagcggagtttttaccgtgagcacggggggaccgacaaagctgaactgagactcggttgtatcgctactctagttctaaggaacggcctgtggtctggatcactcatcattttctctgcgttttcatacaactttccttaggattacacggagaatgaatttgttaggaatacacggtcacttcttacgattgaagcacaggagatcgcgctagaatctacgccatgatcgctgcggcctttatggtgacaagctgcaggggctgtcctactccgagtggcgcggctaacctttaggctgcttgcgtcttggcccccacgtttttcggataatcctgtaggttggtacagtttgtctagagaactaatgtcttaattggtaggtttgtagccgagcgattttggtttgcttcaacggacttgcataccgttttcaggtgcacatccagcccaattctctagttggccatttttggcgcccccaatttttttccggctgcctgatgtacatgtactgtcgccgcatcaatttcacgaggaaaaattagatatagagcgaaagtatggcattcctggctagttcgtgatagctttttgggaagtgggcgtatttcaacttgtgttcctggatatgcatgcattcgcagctcctttagcctccccccgatctcttcagccatgaacgagtgttgataccctacgggttctcgccaaaaaaggatatggcgccagccgctacggcagcttgataggaaaactcgattacggcttccattaaccacaacaactctgggggtcaatgaactcgctcatcaaagcagacgttgcgacgtaattgtaggaatgaactcttattattacgtgtacagcacacggtgggatcgacatcgtcgttgttatagtgtaaagcgctgccgaaatcatcaccactggaacacttcaaggcgggatcccgtcagcatgttgaccgagcgaaaaaaatcggatggatgttgcttgcgcggtagataaattagatgtcgcaggtatatataattgattagggagtatcaaatgtaataggtaatttttcttaatctcaacccgatgggtcaacatagcagcataaattgattagggagcaggttatttaatataacaggaatctcgactgcatatgtgagcagcaataaatatcatattggtcaggtatttgatgcaagaataatggtacctcagtggcatccacctatggactctggataaaatccagagatagtacgtagtactaaggttcaggcaatatagtactttaactgtagtatttgttgaaaatcaatgatctccatctcctgggtcgttgggttggcatcaaggaaatgtacaagggtgtagttgtgctcatgcctctcctgtatgtttgcagcactctgaagcgggtaaccaaacctgcatgaagagccttggatgatatgacggacagaaaacgatggtttcttatcttggatcacactcctgcatgcagttatgagtttattagcaacaatgagcaagaagttgttcttggtggcgtcgtatccgaaagatcgcaaccagctcatacagggcagacacttttcttcggctggaccttcaatcccgacatttctccaaactgttgtagaaggtggttcagcggaacgatttgacgagtagctgatagaaaaactgtacaatcatctacgaatccattaaaaacctgtcgtctacctccagaacccggaattttcagaacattaatttcagggtgagaagcaatcgctcgaccaagaaaatcaatcgccaaaataaagagaagaggtgcgagcgggcatccttgacgaattcctgaattaacctcccacttcgatgactctaccccattcaccaattaacgtgccgtggttcctgtgtgcaaactgtgaagcacatcaagaaactcttgcggaaaaccaaattccatcaaagccgtaagcaggaagctgcgatccaatgtgtcgtaggctttgcactcgtcgagcccaaggatggcggccgagtcagcccatgcaatgcttgcgtcctccagctgggttagcaacagtgcttggacgactgttacgcttttagtcatgaacctgccccgcacaaacccttgttgagccaaactgattatccgtgggagaaatagatgaatccgttctgcataaattctgcctaggattttataagctgtgtggagcagagagattggacgacagtccattgcatttcttgagtctcccttcttccggagtggaacaactacggcgtcaaggaacgagctcggtaccgctgcacccttctgaatcgcctgatagaccatcgtaagacattccgccatctcatccttgaagtccttgtaaaaatcatgcgagagacccgtagttcctccagatttatcacgagggagtttgtcgatcgcatcagcaacttctttctctacgatgggattcacaagttgttgcttctcctccgggcgtaagcgttgggaatccgggatcatatgaaattctcggagagctttctgcatttctgatggattgagagtcgcgtgtgagccccccattatatcattccattcacttgccattttttctgctactggcattgattcggggtagtagtgaccaggcgctggagaaatatcagagatcgtttgatcacgttgccaatccgcgtgccgtttgtagaagtttttaagattggctaccgtcggttgtagagttctgccaaacgctcgttggccttgtcgtacacgggaattgttggcgattcgctgtaagtcctctcgtgatttggcttcacaattcaggcacttcctcaaattgttgtagtgagacgtagttctttacttatccattcgcgccacgtctctgagcattatagagatctgcctagcaaacgtatcccatgctcttgctgggtagctttgttggaaaaatgtcgctttcaacttgtgtagtcttttccggatttgtttatgaacccattctggtgaagcgcttcgaatagggtagtgcgatttatttttcctccctgcactggatttacgtagcgtgagccagagccgtacttcctgatgatcggatttattgctcggtggccgtgcttcaatccattgcgctagtcccgcaagatcattgctcagatagaagtgatccagcctgcttgcagactgctttctccaaaaactaaatgcgtcaaggggtcgggaacgctatcttcgttggcatgcgttgtaagctgtaccgcatcgaggaggtcgagctgatctaccagtcggtcaagctcaacactttcacaggacttcgcacttggtaatccattaattattcgatcaagagaaggctgcagaacggcattaaaatctccccccagtagaagcagcttgacttttgaaatccaactctgcagatcgctataaaaactgcgttgagccttcctgtctgttggcgcgtagatgtttactagcgtccattctcgaaagcgcagtccaattcgtcgtcccgtccactcacttggtctccacgggctgacttgagctgcgatattcggctgcaaaagaataccaatgcatcctgacgatccttccatcttcgaccagtaactgaggggttgtttcggctccttaataccccacaccctgttccacatttctgctacctcatcaatttcctcacttgtcttcaggtgagtatcttgtacataaattacgtcggctggtcgtagacttgtacgttgtttccaaccacgcagccacccagatcgacgctcctttttaaagccttgtaaattctgtgtaatcacatgtagttctgctcgatgctgtttgtttttcttgttatctaacccagatccataaaacaaatctgccatttgctgcagttctgtatataggtccaagtcctccattgcggtagtattgagcatcttggttcatctaatcctgcatgacctccgattcggtcgctgcaatagtttcattctgcatcctagtagagattctagcgcggcccagtctccatccgaatcgtttgcgtaaaatgccctctgcacactagggaaccgctgaagtgcaagaagaaatcgattgagaacctctcttgtggagaactctatcgattcgggtcgcccttgcattctgcctagttcaggtgcatacacaaatgcagcgatgagtttccgcgagaggtaatccgttttccgctttttacaaagttgaaggagctgaacagcgtcgggcttgagcttgttcagaataccccacaaatccggagagtgaagatagctgtcatcaaccattgtagctctttccttccggaagaaatcaagccacgacatcatcgaattgacagcttctgcatccacatcgacaccttcatttcgtcgtcgttcaatcacttcaccaagcttagctatgccaatgataagacaatcaattcgatattgacgggtccagtccagaatcgtattaactttgagcgtcctcagcacatattcaggcgagtcaacttgctgtagccgctcgagcaacacattcggatgcgcagtcaccgcgttttaccaggtcactgcgtcagccgggagccggggaaatggtactgagctgaagttttcccatctttcttccagcgcattccactcgtctcttttaatgcgctccgtgctcctaccacctccagtgaatctactccgttggctatccggaggctcttttgggacgttagagctagtggacaattcgcttcatgactcgatccagatgaggcgatacttggagtccattccgacgtatttgatgcttccatatccacgtcatcatcgtctggcgtggttgtgccgtcgacaccatcttctagcagtctctgctgccaacgaactaacgttgttttgggttctccggtcatcctagtgatcaaatcgacttgcgagctttcgtcccaattgagattgagcagaagtttttgcagacccggggctagtccatgtgggccttgagctggaaaagcttgtagctcctgcttacgatgtcctccattcatgagtatttcttgtagctctgcctgctctctatcggatagacctgaatcctgaattgctgtaagtaaatcttcattttgtgcatacgctgccgttgcctgttgtcggtttggctcatttgatcggctctgattatcttgcatgctcgagttgcgaacgggtgttggctcctcggccactacagcttccaaagcaaaaaaaattctccaacaattcatcactgggcgcttctccaaattgtagtcgggtgtagtgctgagagccaaaatgaataacaatcggcagtgcacctgccttctccccctcaacacaatcttcttgcagcgatgttagccattggacaaccgattcacctccatagttaaattctcctgcggacatcagctcatcagtagaagtaactttacggatgggcttgaaaatctgataactagcatcagcgagaccacttggtgttacgaccagatagatcggtcgctggagtagcttcgttactaacaagagagtcagctcagatccccaaaaagatcgagggatgaaagcagtgctcttcgagctgctcctgcatacgtcctcaatatattcgcggagatactgcgacgattcctgaacagtaagctccccagcgcgctgaatgtgagagctgagaattgtttttctgatatcgtggggaaactccacatcaaacccgtgttccgctgccatttggactccctttttcagtttgattgccaccctttcggccgcctttacggtctcaggacccgaaaaatcaacattcagcaacgccatagcaatcgcgtagaattgacagttaccagtgcctggcgtcgaaacagaattttgtccacatcgcttcaatacttcaacccctggtagctggccgacgctggcaaggtcaatgtcccgacaaaggcttgctctttctggctcgcgcaaatattgccgcttgtaaacagcttcgcagatgagccgattttgcttcgacaatgactccggtctcatgagaaacgtcttgcctgatgactttggcaattgctgttctcctccctccgaatcagatgaagagtccgacaaatcgtccaggttaataacatcttcccgtagctcagtatccttcttcgctcgcggggcgttctcttgagaaaactcggccgccgcttctcgtgctgtctttcctgggcggaacgttctcgatttagatggcattttccactcctcatgcactcttggctcctgcaacgggaggcaagactcggagtttccgttctgttccttgacattctgactgatagccgaagttccgctgatcttttggttagacttcgttttatccttccacatattttccagttcctgaaaacttgtaaccgtggatttatgtcggtcaaaggaagagatttctttcgtcgtgactataatacagccactaccacgagaccacgcatctgagtgagaacgacaccgagcaactgtgtgcccggatacaccacaattataacacggtggtgctgggttcgttccgacatggtgcacaagaatcttctttcctatccagttgatgaacttcactttgtccaaaaacgatggacaccctggggagttgaagtaaatctcccatgcccccgtctggaacatttggcgtctgtacttcggttcttggaacgtaatgtagctgcctgagaacctcgagcgaataaaggcgtctaatgctgcctcatccataaatcgcgatacgttgagaagctttactcggtagcgaccatgctgctgttcattgcgcactccgtctacactaatttgacgcctccaaattctcgcactgcgctgctttggagtatcacccggttggccgtcggccggtctggcattcaacaacagaaaacggcggttgcgaaatggtacactcttaaacacggctgaccagcctgtgctcgtttctcgcgtctagaagaacatgtgcactgagtgctgctgagaattgtatcacacttgcttggtttcgcctagcatctgggtgagtttggcttgatccatgtcgcctcgcttggcgccttgaagaatagcccccaccagtcgctctctcgtttgaaaatcggggtaaacggggaattccataggtagctggaaagacagttctccttcaacttgtgcatatatcgtgttctggattgctctgagcatgtcattctcacacgtcctctttagaaattgaggtagtccttgcgccaatatgttgccttcgagtagaccttgtgttatcatcatctccactgatgttggtgcgcgtaatgcaaccgggaaatcatgctgttcagtgtacgccgcccgcattgcttctatctcctcggatgaatacacgtcactccgaaagcgcacaatcgggttcgcttcttccattggatcatcttcctggctatccgctgctcgtgctaacgggttcgcagaccatgggttagatgtggttgtagtacggaccttcatctcgctctctcttagttcaatcgtatccagtagagaacgacgcgagccgtagatggatttcgtgagatcacgaagccggttcttccactgctggcacattgctccatcctccatgacctggacccaaaacagccgtaggagcccatctaattcgacttgcaacagcgtcggaaagtgatctttttcctctggtaactcgccactgtcatgcatcttaaagacggttgtgaacatctgctgcatgaggtaccgatcctcagagctgaccgacacgggagtaacggcttttgtatccccggtggtggcttgaacatggctcagaaaggtatcgaacagtgtcgggaacggtagcccatgtgaggccgcacctggtggtccatctcgaggctcttcttctggttcttcttccgtcgaatagtttttgtcagtttttcttgttttctaatttttctggttcttctggttttgctcttcttcacattgcgctgtttctggtggtgatggtggactggaaagtggacacgctgggccaagctcagtcgtctcttcatcatctgccgtattgccactctcctttccagctgtagctgcttcctgcttgcaatcaccgctatccagggaggaacgccctcagctgcagcttcctccatcttctgccttgctcgcaccgggcttgtatcggggggatcaccttgatctcccattaggacagcacttcacagggtcgcggcgctctcaatagaaggtcgtatagttcagccaagacaaatctttcgctggaggcctgtggatggctccgtttgttgcttcgtatgggtcactcccaatacccacgggttgatcttggcctgctgtcgctttgacggttcggcggctaaatcgggagtgcgcgaagcaaggccagaagtgtccagtttgaccgacaagtgggtggttgcggagtcattgaacattttcccaggtctattgtgaaatttccgatatagcgccaattagatcaatcctacgccccgagctaagctattcagacttgctaaagtatttagtgaagatcaccttcaatagcgagtagataatctcggttggtacgagctcagtcttcgacaagtgtatcatagcaaaatcgtgtagtgctaagagtctgatagagcgctgacaaactcgttttaaggtctaaaacatatacccaaaaagtttctgaatcactcagctttgtgcgaaaggccccgcgggcttgctatagctacatgcccgctagctcgtctttgtcggttcctattctggtccatgctgtgctaatagatacatagcactttccttctccgcaggtgatacaccttcaacagagctgcatcaccacaaattgctgcaaatgctggctgaaatccgaatccccacatgatcgcaagtcagcgtcttatgttcgacagcatgctctgtcatcactgatgagtctcatacatgtaaaatccgatcggttcttccaatcccgatcggaatgtgttgcctcgtggacagcgatactggcgtttcgagtcgagaaagcgcactgtgattcagtttgcaatttgcccaacaccatccaaagtcccgcaacaaggaatcatgaagttcgccgccgccgccgccgcactcatctcattcgtgatcgtcggcacttccgccgatggtggctccagcgcctgccccggcgaaatatgccccctgaggcccctcccgtttgcggaagtaacggcgtcacctacaacaaccaatatgagttcgacattcaaaactgcgacaacggggggatccaagtggacagtgctgcaccagggcacgtgcaacaggagcgagggcggcaaataatttcaagtcggttgccaaggctcaacttgccagcgcgttcgttacccctatgacgggccaaaagggtttgctgtcccggacgactttttcacactacaactgaataggacgtgtacccatagggggaaatggcatcgtcgcaagacaatttaatggctttgaatttcgttcgagtgattcccctcttcatctattgctgtgaactttaaacacttaccaaacgtgagcgagccttattggcgttttgctaaccatttgtttgtgtatactactagagcttgatgctttaacctgaagcgctctcgttgcttacgatggcagggaattatacagtgacgcaagttggctaagtttacatttagattcactatgcccaactgcagcaccgttgtaattcgtcactacgttgaagctacagtgacgaatttcctttcagttccaaatcaacaccatagcaggatggctgcttcgtgcgtggcttcccacgctgctccccagtccccccagcccttcgaggagcaggacaggacagcgctcactcgcgcgtggatcgcggcggcggaggaatacgcgacgcagacgtcgacggcctccctcaaagacgccctcggtcgtcctggagtcttctgggacaaagtgcaggcaaagtacaacgcagtcagcggtaacgtcccgggcctggagggagtggagcggcagtggttcgggtcggcgaagggtggggtgttttcgaaatctgctgggttatcagcatgtcatacgcggcaccttccacaacgaacaacattgcagagaacatggggctgcttatggggttaaaggcctgtcatcgccacaattggagaccactccacgtggttggtgatagcaaaattatcatccatcaacagcagaagcggcgaccaccaaaggctaaacacctcactcagctatactggcaaagtcggcgggttgcggatcaactgtcggtcatcagctggcagcatcacatacgcgatttcaacaatatggccgatgcgctcgccaacctggcgatgaatacacggcgtagcatgtaatgtgaagtggagtgtcctcttggtgctgctcacgcagagatggaagcaacgacaacactcagctgggcagcaaaagccaccttgttggtcgtgtgtatattctcaactgaggcctagattcttctctttcaccttttgtcttactcctactgcaagtagtatagtggggatcagtataatccgcaacagccccacctacggattcccatcaacttgcatctccaaatcttgcccttggcaataatcccattgcagctctgtgtttttcaaatgccggacgtgccaatggctttgtaaaagcatcggccacgttatcaactcctggcacccgaagcacgtcaatttccttcaaatcgatgcgctcacgcacgaagtggtggcgcacatcgatgtgcttggtccgagaatgaaacacagggttgctggcaagcttctttgcactttcgttgtcaacaaagacttgggatggctgaatttgctgcacctgcagctccttcagcatttggcgcaagtgcaccacctcctgcaccagtagactaagagccatatattcggcctcggtcgtgtgcagcgcgacggtcttctccgtctggctgctccacgaaatgatgctcccacaaattgagtcacgtagcctgcaacagactttcgatcatcaactcgatttgcaaaatccgcatctgcgtatgctctcagatgatcatccagcttttgatctgaccacgctaggccaccaagctggaccccccagtccgctgtgtctttcaggtagcgcaatccacgttttgcagctctccgatgcaacagatctgggttttccaagaactgactgctaggtaggccagatcgggtcgggtaccgagcatcaggtacatcaggctgccaaccacagcacgatatggcttcgatctcatcagttgcctttcatcgttttcggtcggacacatggccttgctcagcttcagatccgccgtgcttggggtcttgaagccattgcagtcctgcatgttgaaccgcttgagcacggtctcggcatacttctgctgaccaatgaacatcgttctctcggcccggttccgcgtgatctcccagcctagaatgtagtgtaactccccgagatccttcatcgcaaaccggtcctcgaacatcttcttcatcttgttgatgagctccatcgacggagcaaacaaaatcagatcatcaacatagagagggatgaagaccaactgcccatcaattactttaacagccacgcaggcctccgactgcagcatcgtgaagccctgctcctccaagaacgacttgagcagctgaaaccacactctgggcgcctgcttcaattcgtacaggctcttctttaatctgcacacccagtcctctttgcctttcactttgtagccttcaggctgctccatatagacctccacgtcaatcgccccattcaagaaagcagtagtgacatccatctgatgcacttcataatcccagacagccgccagtgtcaagagaacacgcagtgtctccagcctcacaacaggcgagtacacctctaggtagtcgataccataaaactgcatgaagcccttgatcacgagcctcgctttgaagctttcgatctctccgttcgctagatacttgacgcgaaagatccagcgattctgcagcactttcatgtgcttctcacgcggcaacaactcccaggtatcgttcttcatcaacgaatcaaactcatcatcagctgcatttttccattgcaatgagtgctcactctccatagcgttaccgaaagtatctggctcttcaaactcgccaatactcatgcagcaatagtcctcccaccatgcaaggatcaactcgttcgccatagcacgttgaaactcagctcgtgctttcctccatccagcaggcaacgagttcacatcatcatctggatttgtattttcgtaggcaatgtagacgtagtcaccgaaccacgtgggcggtttacttacccgaccgctccgtgtcactggagggtctttagggcgagtgcctctcgggcctgtgtactcacgaagtgctgtgcaaggaggcgttgatagacgccccacactcgcagcatcactcgacacttggctgtccgagtcggcccgctcagcagccgatgacctgctgtccacctcttccacctcttgactccctggtagagccctcgtttcgtcagcagccggtcccttgtgccgcccactgctgcgtttcctctttctccttcttttggaattgcctggcacgcactcacctcgcaggtggtctgcctcatgtccattaacacgttcctcatcacgttctgccaccttgcaagaacgatcacatccagatgctgtagagctcactccacgtccttcatctcgttctgccaccttactagaacgtccactttcaaacaccgcaaaccgcactctctttggtcgaggcgctgcggcatcaccaccggggcctctcttcttggacccacatgccccatctgaccggacatcttgctcaactgccccacctggtcggtcatcacatcgggtgtcatcagccccaccagtccgataatcacctccgtctctggagtcgctggccccaccagtccagcaatctccatcatcacgataacggaggctgcatttggcgttaatgccgagtccatgagcaatcgaccagctttattctcatagaacacgacattatggctgtagaaggccttgttggtcttgctatcgagcaagcgatagcctcgcttctctcgcgaatatccaacgaagaccgcctcccgtgctttcgcctgcatcttccgtctctccaccttgtcgatttacgacaggacggcgcagccgaacgtccgcaacttctcataagcaggagtctgacggtgccatatacctccatgcctcgaaccgagcttggcataatgttcacggagtatgcagctgtcatcgctgcctcaccccacatcgcttcaggcaggtcgaagtgcacgagcatgcatcgtattctctccgtaatggtgcggaccattctctccgcgacaccattttgctccggagtatgcttgatgctgctgccaaactccataccatacttcgtgtcacacgtactttgcagcttcttgaactcctttgcattgtctgaccttactgctttcattctgacatgctgctgcgtcttgacgcgttgatagtactcctcaaacttctggtacacttccgaacgatgctccagaagatacacggtgacaaaccgactggcatcattaacgaacacggtaaagtaccgtttaccaccgtaggagtgctctgcatacggaccccaagcgtccacatggaccttttcgccaactaaccactcgcgggtctgtgtccgagacttcttcatgctcttcctcgtaagtttccccttcacacaggtctcgcaattgaaacccaccgggatacgcaagttcacatgtggcaacggccactgatcatggctgaacagcgcattaaacgcgttcttgccagggtgccccaatctcgaatgccacagctccaaactactcactcgagctggtagcgccaccatggctacctcttggggtctctccaactttaagcgatagagattggtataatcaacttgagcggtagtcacaccagcctgtaagataacatcagcgcgatctgcctcatcaaagtgcaccttcacacgatcacgttcaggcagatattggttcagttgccgtcgcactgaatagagactgcactgcagctttgaagcataacgaactcctcgcagcgtcagtgagcacctcccaccagtagtctccagctccttaaccacagtaccaataccctcaacacccagcgagttctttcctccaactcgaatccgggcgctaagaggcgtgaactccatgaaatcagtgagctggttcgaaatatgactcgattcaccagagtccaggtaccagttatcatgggctttgtctgcgacaggctttttcattttcatcacttgaagaataacatacgcgctgtcatcactttcattagcgtagctactcgtttcagcagccttagcactctttcctccactcatcttcacgcgcttctgagcttgggtgctgctgcgatcttcagctggaggtcgcttgccaagaaacgggcaatcaaacacatgatgccctgcttcatggcagtgataacaagcaccacctggcttttgtccactgccggcttggccacgtccagttccacgtccaccaccttgactcccgcgaccgccagaaccacgtccaccaccggaaccgcgcccgtgtcctccagatcgaccaccacgtccacggccgcgaccacgtcctcgacctcttcctccaccagcaaagaacgccttttcttcatcatcattgtccttggcgccctctgctttccgaccttggcgatggtcgtaagccatctccaatgcgagttcacgttgttcataattaggaggatcatcagcattttggggcttgtgactggcgagaaacgtctgtacaacatgatcatattcgcgcggcagagatccaatcaatagtgctggctttacatactcgtccacaggacgcccgacgccagcaatggtctccatcagccgacgcatctcgctcaggtgatctggcaaattgccgttgggagcgagccgtagccgactgagcttggccctctcctcagcgtacttcaggtacgtcttgtccataaatctctttttcaggcgctccatgacacgaaacggggtgggttcatacttcgcagtcttcattatgtgattcgtcattgcgtcgtagatgatctccttggcgtgggccatctcgctcgtccacgtcgcgtgcgcctctgcctccttgctctcgtccggctcgagcaagtcctccatgcagtacttccacagcttcttcctctccagcttgagcttgactcgctcgtgccagacctcgtagtccttgccgtcaaacgtcgggatcgtcctcttctcctcgtgtgactccttgggcgtcttcttctgctccgccatgacgtcctagttgctgtgctccccacgcgtgagccttgggctcataacctgaagtggagtgtcctcttggtgctgctcacgcagagatggaagcaacgacaacactcagctgggcggcaaaagccaccttgttggtcgtgtgtatattctcaactgaggcctagattcttctctttcaccttttgtcttactccaactgcacgtagtatagtgggggtcagtataatccgcaacacaatgtaaacccgctcgagtcatcggctccgactcgatctgggaagatcttcatgcctacgcagccagtgacgtggggcactggctggagcacatcagcgatgagaacgcttcggggttcggggccttcacaccttaacggttgggggcagccctgagtgtgtagccactaggggtaataaagcagggagatcggtttgagacgacctccgtcaaggtcatcgatgtcgttagccacgaagttaagtgacaacaatgtacctcaatgccaaaacaaaacagtcagcggtaacggcagggcagctgaagaactcctgactcaatggcggcagatgctgcagccattgaccgacttcctcgagcttttccaacacaaatacttcgagtcgagacccaacttccggtacgacgacgcctgcgtggggcagtcgttcaagtgggcgactgtccagttccgagccaagaccggggccaaattcccgcacgtggcggctgcgacgcagctcacgagccacaacaagtggtggagcgtgctcaagccgctcgtcatgctgcagcgagcctcttcagtagagcaggaggaggggggagaggaagaggagggggcattggtagtttctgggctgcagtcaacaattgcatccaagcggacgagaagggaaaaagaagatggtggggatgacgagaaggacagtcgacgtatgagacagcgagtggagccccgggaagttgagctgccaatgtctccgttcagaccgcagagtcccggaatcgtgtcgccgctgccgtggaaagcgacccactcgaatttggatgaggtgaaactgcggaaagtggtggcgatggagcgtcgcctggatctcgacaccatgacgcagggagaagacggactttcgcctgaggcgcaggagtatctgcggtggcagcgtcagcagattttaaggaagatgcgagaggaaatgaacgacgtcgctaccacgtaaaggagaccagtggtgacatcgctacgatctgcgctgtcgggtcgatccatatctacagaagataatatcactgcaggattattatgaacatcatattagaagaagaaaaagttgatgaactagataatggatatgcagtttcgctagctacggtaagttatggtaatatctacttggacaactcaattatggccgcggaatccaaattcgacaaccctgttggggtaaactaattggtttgcgtgcatcaaacccaagtcgttgaagctatgaacatcatattagaatgctctaatcgacgaatgactgacgattttctacgattaccgcaaataaccctataagaaattcgcgagaccactgtttcgacagtgtatattgcaacacgcatgctctttctcccgatcgagttaaccgcgtatttattctcatggtagtgcttctttggaaaacaagaattttcaaaatttgaatgcccccttgagcaaaatgctaagaaaaaggaagttagtacacaattatggccgggtatggttacgaaaatgctacgagaaaaaacctcgctactgttcgcttgggggctgctagtttgcatacaacatacatgtacacaaaatgcgttttcgggacatttttggcgtcaaaatggagccagtatctgtagttgcccacaatggagttattaacccaggaagttggagtccgcgctgccagtccgatgaacgctctctggtttgatgcccatcgaattccacttttcaaactgcgcgaactgcaacgtgcgcgccatgtcttttgagctctcgttccatatgagttgttgagcaactttgccaggtctcgctcgccgtaaatattcgtcaacaccttgatctccgttgttttgacgtctggttttctgttgagcacaaccacgaagtcctgccaagccctgaaaaagctttcaacttgaccagttccgcgactttgttagtgacatctctctcttcgtctttgccctccgggttgtcaactcgcactgttctttcggcaggggcgttgtgctcagcagcagcgaacgagcgagccacatcaatagctggatgtttgagcgagaccattttcgcggtagtcgttggcgtgccaccggcaattgagatgagaacagcagaagccagtagagtgatgatatcgtgaggaagcatcgtgtcgctcttggccgactacagtgagacaacatgtacttggggtgcaaaagacggattgttactttgctttgagttgtctcgtcaatttagctgatgggcagcattggatatgttactctgagcctcaggctgaggccttcagcccgagggaattttagattgccgtaaatttctttggtaccattgatgcagctcgtcttcttgagcttcttgaacatcttcatctccagcaccgagatcttgcggtacgtctgaatcaggaactgaaatttaaaattaaaatgataacgatcttgcgtggccctggaaagagagatgtacacgtgtttgcttctttggtaggcacttccacagcctcgaattcaactggaattatatatctagcatatgtgccatcactagtactgtacatgtagaataattaaaaagaaaaaagtgaaagtagttagcggaggttcgcccactccaaatttcgtgatcgattttacgactcggtcgagataattctagcgtcgacaaagaattctggcccacggaggcatacgccagaagcattcgactattggttgtttcgacttgtcttgccgagttccgatccacccgtccctcattgtggcgcattttgttctcctcttccacatccagttcagtaggcaagaggtatttttcacggccatgtccttctctcaagtttatctttcaacctcagacgggcttaacgtggaactgaggcattcatttactcatgacataccggtttttagtttctcgtcggtcacagccaccttgtcagtcgcggacggcttcataattgcaaaccttttatgagaccttctccggcttcacaaaatcaatttcaagctttcaaagtgcgggagatatacttgatcagattcttcaaggcagaagattgaccacaatttcatgttgagattggacactcttgagttcaccagcccgctcttcgtaacgtacttccagaccatcagctcgtagcatcctattcgcgtaaggatcggactgggggtagtcagccacagccaccgaccactgcatgcgcagcattgcagtgccaggttcaggagtagatgcagtgctcactcgagtcgctggcgttaacagtaaaaaaataacaataaaaatcgccctgggggttaatgcctcggcaacaggaagtgccacaaaaacgaatcgtgaggagaaagggtttgaaatacggtgtgctttccgaccagtgaggcttgttggcagcatctgctcggtcgtcattcatgaggagaccctccgaatgtcaaatccgttcggtcctatttacctgcgaatcgcgccgatcagtttccaattttctcaacacataagcaacagccaagtaccacctcgcaaggacccatgaagattgccttctggtttctccgtcggtgtctgggtctggggatatctggggccgctcaagaacaaggcgggtaaccaagttccgctcaaggacaaggcgggtaacgtagttccgcacaagatcgagaagatcggtggtgccgtcaaggcggcgccacgagacgaaggggtcacgtcgtaagccgggcctagtcgtgtggccgacgacgccagtcgcccgcgactccgagcctccagccaaggctccagccgccgaagagtgttatcacatcttcgacggcgtgaccggtcgtcgggtcaagacaggagctgtcgagcttacagctctgcccgaggtttcagagttgctgaaccttgaggagctcgccatggaggacttcttggccgagctaaaggccggggagatcgcagagttggttctcctccgaccggagtccacgtcggccgagttgaactcgtcctcggtcatggaccaggcagtcctggaggagttccagagacagcgcgcgtcgcgcatgggctctgagattcttaagaacccccgggacccggtgtaccccttggtgaaggagtttgaggacgtggtgtccaaggatccaccgtccaatctccctccggacaggggaatcaggcacgagatcgatctcgtgccgggcacgaagtactgtgtcacgaggcaatggcctcttccccgggagcagtgtgaagtcattgatgccttctttgctgccaaggcaaagacaggcatggtgcgggagtcgaagtccccgcactcgacgcctaccttctgtgttcgcaaaccgaacggaaagtggcgtctggttcatgcttataacaagctgaacagcgcgacagtgcctgcgcagacaccgatcccgcgcaaggacgtgttgctcaacaacatggccggctgcacgctgtatagcgcgctggacctggtggacggatactaccagatcctgatgcgcgagagcgacatcccactcacggctgtgagcacgccgagcgatatgctctgggagtggctggtcatgcctcaggggctttctaacgccccggcaacgttcaatcgcttggtcacacaactgttccgacctttgcgtgcgttcacacagacgtactttgacgacatcttcgtccacagccgtaccgaggcaggccagacggccatggaggtgcatctccagcaccttcgacgtgtgttcgaagtcatgcgggcgaacaagctgtacgccaacatcgacaagtgtgtgttcgcagctgaggagatcaaggtcctgggctgcttcgtcagcagcgccggggtccgggcggacccggagaaggtgaaaaccatcgcggcttggccgccacctcggtcgcagaaggacctacgaaagtggttgggcctcgccaactacctgcacaagtatagtgcaggctacgccgatctggcacggcccttgtcggatctcctgaagaaggatgtcgactggcgctgggagcgtcgccatcaagatgcttttaacgacatcaaagcgagcttacagcgcgcgcgagtcctggcattgccggacgagacgaagcctttcagcgtaagctgtgatgcgtctgactacgcaattggctgtgcgctattgcaggtcgacgatgaaggccgcgaacgggtcatctcgttccagtccaggcagctcaaggcagccgaacggaactatccagtccacgacaaggagctacttgccatgaagtacgctcttgtcaagttccgagtgcacctgctggactcgacgccctttgtcgtttatacagaccacgcgtccttgcggactgccgtcaacacgccgcatctctcacagcggatggcgcgttggctgtcattcttcgcggaatacaacttccgtgtcgagtacaagccgggcaagttgaacgtgcttgccgacgcgctgtcgcgccgacccgactacgagcttgctcatattagtcgggtcacgacggatctgtatgatcgcatcaggctggggtaccgagacgatgccagtctcggacctcttgtgcggttcttggccgctggcttggaagccaaggccgagtggctcacgccccgacaacgtgcaaagctgcaccgctatgagtgggctgacggtttgctccactatagggtcgagcccgaggatcctccccgtattgtcgtgcccaacgacgaggatctcaagtacgacatcctgatggaggcgcacgacgctccatccagtggccatctcggccgtgagaagacgtacgcgtctgtctcgcagatgttttggtggcgtcacatgtacaagtgggtcgccacctacgtccgtacgtgcgagacgtgccagcgcgtgaagcctgccggtcacgcctcggcaccattgcagagcctgccggtcccagcggactgctggaagtcgatgagtctcgactttgtcttcggacttccggctgatgaccgtggcaacactggtgttgttgccttcgtgtgccgtctgagcaagatggtccactttgctccagttcgtgacaccgtcactggcgacgaggtcgctcgcctgttcgtggactgtgccttccgacaccacggtctgcccgagaccattgtctctgatcgagacccgcggttcaccgctacgttctgacagacgctgtttcgccttctcggcacacgactgtcgatgtcgacggcggaccacccgcagacggatggccagacggagcgcgtcaatcgcgtgctcgaagacacgctccgcagtatctgcgcggagatgctccgctcttgggctgatcgcttgcccatggttgagttcgcactcaacaatgcggtacatgcatcgacgggctttacgcccatttacctgaacgggttgcgccaccctcaggtgccgctcacattacgaggcagtaccggggcttcggtcctaggtgggagagaggctcggaaaaccttttcctcccaagtctcggacgtgagtccagccaccttgctgaagcaactgtcctcgtttgccgaagacaggctgaacataatcagcagggtgcgagacaccatggcgcaagcccaagataaacagaaggagtactctgaccgaaatggaagaggaaccatgaacgtgtttaaggttggggatttagttctcctagatactagaaacctaccgctaaacactgttagctcggtcgagagcaacaagctgaagcaccgcttcattggacccttcacggtcctcagctggcatggcgcggcgtacaccatagacttgcccaagtcgatgacgactcacccgacgttttacgtgggtcgtcttaagaggtatcatgaccctctggctctggctgccccgaaggaagcggtgggtggcccggtggacaagagcgcagctcctcgaagcgcggcgtcgggtcgcggtaaggcgcctgatacgcgcgctggtcgtaagacggcgcggcgtgcatcggagcagcatacgcaggggccccgtacgagccctggccaaactgggcctgatacgagtgggactgctgctgctccggatacggcgcgtggccatgaagttcggctcgaaggccagcgagctggtttcgcagcgagtcgtaagacgacaggtcggctcgacgatccacacggccatggagactgcgagtttcttgatagagcgaggcaacatcctcacggagccgctccacggcaccaggctgaccagcacgagcggcagcctcgccaccaagaccgacgccaagcgcgatctcgaggacgtacacacggtcccggagaagacgaatctcctcttgctgcagggcctccacctgactcggggccccagcatacggctgcgtcgcctcaggctcgtagccatggccgtgcgaggccaccgccggccctccttgatcgtaatgggcagatccactaccacgtggaacgggtcgtccgggagcggcggctccatggcaagcgccagctgctcgtgaagtggaggggtttccctgagtcggataactcgtgggagcccgttgagcagctccaggcagactgcccgaaggctgttgctttatgggacgagaagcagcggcagcttcgtaagtagcccttggcttcttggccggtacccggggcacggtagcagacgtagtcgcaccacgcccacgctcttcacgagctttagctctcgcctcttgcttcagctcatccatcttcgagtggagcttgcgcttgctcacgagttgagcgaactcgatgcggagctcgcgcacgtccaggattgcggacagtgcgcaatcctcacggagttcgttgaactcttggtcggaataccctttgcgctggacgtagcgccagaagaggtcttccacctcgctccaggtcatgttgacattcggcttgacccagtggaaaccccacacaggatggagtccacccttgtcctccagcttcttgcgaagcgtggtgaactccttcagtgtgagcttgtgtggtgctagtagcacacaccgggcgacttcaacgtcgccaagaaagaggggctctttctcaacaagagcacgctcataggaacccctcgaggtgtacccgccgatatggccacgaggagccgagagcttcaccaacagcgctggcgcaccagtgccaggctcgggcgggaagtagccctgcgggtacgtggcatccccgcctgaagaagactcgatggcagtcgtggcagtcggctgcctggcatacgcacccgagctatcagcgtggtattgctgctgctgctcgtcgaggttgttggagagctccttgggctcgtgaacggcaccctcatcgtcctcagactccgagtcgatgaacagcttggagctggagccgcgaggcgacctggaagctgaacgcttcttcgccttggcctcggcggccttcgcagcggcagccgctttcgacgcttgggcacgctcacgaccttgtgccagcgtcagatgcttggatgccagcacctccttgggcttggagcccgcgtcgctcggcgacttctgggccacgaccccagcgtcggccatggcgacttcgtcgtgcgactgcttgctgtcgcctgagccggactcggcgtcctccgcctccttctctgacgaagcctttgcgtcggccgaggcgttggtcatgtcgcctgccgccagctccgtgccctcggcagcgtgcgtgctgccctccgagacgttctcgtcgtcgggtgaactctcaccggagtactggaccatcgtgcagtcaaagacggcggcttcccagtcgcgagccgggcttttatggccccgaggactctcctccttgcctcgcgcggcgtcaggagacttgcttcgagcccaggcctgacgaccactctccggcatgctgctacgagagcgcgccacctcctcggccgccttcgtggcctccatcagcgcggacgactcgtccttggccttggccgccctggtcttcggccctacggcccgctgtttcggaggtgctttcgcactgcgcgcactgcgctttgaaggcatgcttccggtcgacgtggagaccctgcggcttgctcggcgatgcgccagctgctctgtgaggcccgggagccgaggcgccagagctcgcgccgttgtcgatggattttgactttacgagtgaaatgtgagtcgccggcgtaacctcgctctgattggtcgataagatcgaatctaagtgggggaggatgtaacggggttacatggaatagtgaccctgtcactattccgggatggctacatcggtcactcccctggatagtgacccaagtggcctcagagccaacagatgcattttgtatgacacaaactatagggaacttaggatgtgtatgcaggccaaatcctataaatacattcagtcttaggtctaccgcttttcaagtcaagtcgtccccttcagaccagggacacgtgaacggctgttcacttggcgtttgtatagtcctgcttcctctgttaagaagtgctgtgtgccccatcacaaccagcctctgccggtacgctatcttgtgctcgtatttagcgctctaggcctaaccttttgtattggttgctatgtgtcgtaggcgttcgttcatgcgcctgctagagcgattcagcatgttctacgatatcccgggatacaaccccaaaggagggaggccaaaaaagcttcagaacaaccaccaggtgctgggtgtcttaatggccttctacgtggactcgatggcgtacaaaacgctgtgcgggtacttcggagtccctcatgctactctcagtcgtgttctgaatgccgctgaggatgctatggggcgggctctagcagggttttccccagcaagaatcgtgtggcctactttggcccgccagaaggcattagctcgacttactgcagctcgggaacccctgatgtcgtttacgtggggctttctcgatgggaagaattatcgtgtacgtatttggtttttcttgtttgagagcgagtatgaatcggccagtaactaacgcgagataggatgctctgaattgtggttatggtgctaggttcttgagccccccacccagacattcaaaatgcgcattacaacggttggctgcgtgcggttttcgtgacgggcacgctgtgcttcggggcggacggcttgatcgtgtggtgcaaacataactgcccagggagttggaacgactctgacaccagcctccagtttcgccagaaactcctggatgccgagttgaaccccgaccctcgttatggtgtcgtctcggacagcgctttcccgtgtggcgacgacatgattgggagaatcttagcgccgctgaaagagggagatttggggaggcttgttccgtccgtgcgtcctgcagcacaacgcatgtctgctgctatcacctcagtgcgccaagctgctgagtggggcatgggatctatcgagaaagtataccatcgcttgttgcacccgctaccttacgatgtaggcaagcgtaagcagaggctcgacaatttgtttcgcctgtcgaactacagggtgcgaactcttgagataagccagattcgaacttcgtttgcgcactggagagaagataatgcatcaatgtattgtttgttacgcttcaatcgatctgctacaagtaatgcaccccaagccgctcttacttccccccatcttcgccaggaacagcatcatttggtcgtggcgctgtcgagcttcctcacgatcgtgagctagacgttcttcgtagcgacgtctgttctcctcccgttcttgttcgaacctggcatctcgaactgcttcgatgcgtcgtagctcctctcgggcctctcgagcttctcgcagttcctcctggcgtcgagcttcgacttacagcagcatcagcacgccgaatacgttcatgctcttcgcgctcgattcggcgtctcttctcggctgcttcagcatccgctcgacgcacttgttcgcgttcatctcgctcggccttttcagctgccaaacgctcctcgcgctctgcgcgcctgcgagtctctgcagcttcagtctttcgctcgctgtcttgctggaaaaagacaagcatctgcgtcatctccgctcctgacgccgaccgcttcttctccaggtagtcaatttcctgctgcatttggtcgagccgctttttggaactgattcgcttgttcccagcgtaggaagcgttgctggtggacccgtcggttttgttgctctccgaagaagagggccccccgtctgaagtcatgaggccctgagtcatggtgttgaagttgtcacgcagcacgcgcatgtcgcgtccgcccaggcgcttactggtgatactaaggtttgggttttctgccacctcacgcgtatcatcttgggcacgtccagggtctcgaagtagaacggggccgtctggggaagcgacggtgtccagcggttggcgtcgactacctcgtgggcgacctcgggatgaagctggtgttgctggtgttttactgccagagaccgccgatatacttgtcagtgcccaccctggttgacgggcgtctcgagacacctggactgacgcgggcgctagcacgtcgttgtgcgacttggggggtacgttgggtgtcgggggtggcttcttcctcagcaaccaacgccacatcgccactagctcccgcagcctcgcgagatgatcgggttcggttgtcttgcgggtcgatattggcgctaacggctggggtatctgcattagcgtcctcaccagacgaaagagggggaggggaagtcgagatttctccaaaagccgcgtcgatagggccattgctggtcataatcgtgccttgtgcaacaacaggaggcgatgggggcggagttcgctgggcgtattggttgatttcatcgtctccgttgcgattcgtccacacttgactctccccagatggagcacgcccgtcaccgcgctccctgccgaatgcttgatctaccgctgcgtcattttggtcggcctcctcacggtcgtcgtcctcaccaacttctccgtccgtctcggcatcagtgacttgcccacctgcagcagcagcattagcagttagcaaagcacaacgaggagatgtagcgcttcatgctaagacagactcaccggtaacctggtccaccagttggagcaggtgatcatcatcttccccctcatccagaccgccgtgtgaggtgtgaacgccccccgaagattcgatccgatattggatttcttgagcatacgcgataggcctgaggcgagcgggtatctcgccatttcgccccgtcggcttgggcttggcgtacattttcctgaacttgcggcgcagggattcgaagtcgcgctctggcgcgtttcggtttcgactcgcgttgtattgaacagcgacttgttcccacatgttgcgcccgagaggcaggactctgtccacaatggtgcacaagagcatctgctcgtggatagagtagttgatgtacccagctcgacgtccacgctgcacggcaaagtcaacaatgaataacgtcgtaaggcgttcgttagcttcaaaatgtgcaaccgtcgaaccgtaccgctgccatggcgaccacagctccgtcgtccgagtagcgcgattccggaagattgaaaatgaagctctcagtaacgatgctcttggagcaagatcaatttggagatgcaaacaacttgaccccactatgaaagcaaacgactcgacttcattatgccccatatatatggaatgaatcagctcttcggtttgcacatcaacttgaacatcacgttgcccatccgaggcgtaacgcgtcacgcctcaaccctttgacgtcgggcaggccctggtcggactttcacgtcaggaagatgcttgattgcacggtgttggcaaccctcccaaccgcagcggcatacaaaccacagtttgttcccgtatgaaacggtcacctgctcacctgccttcacgtcccgaatcgtgacggcgacaacacttagcttcgagccagtctgcacttcgtggaagcgcgcactcggatcacatgcatgattcatcagctgcaacttgccaccgcattccaaggcgtcaatacccacatgcttgtttccggtagtgcgcgtcttcagatgcatgcgtaagccttcattcacaggtccattcttgcacggtgggccaaacaactggatgtggccgaggtactcgccaataacctcgcccgcagggatggcctccttcgccaccaacccccgcatacccgatcgcgagctacgcgcaatgaccaaagcagaactctcccgaggcgcgttaccacaaacgccgccaaatgagcagttgttcccggtgcagaagtggctctcctttgcgtttaagcaagttatggcgttggaacgagcttcgcacccgcatccagctccgccacgaactccgatagtgacgaaggggaacctccagcgtcttggattgaactggtccgtcaggaattccacgtctgcaggccacgcctctggagtccattcctcgcttgtcgtcgtagaggagatttgagccctctctccagaacccttctgcatagcttccgccgattgacttggttttttaggcagcgacgctattatcgcaagcgcctcggaatcgtagccatcagattcaaaggcttcggagaaccaagccggaatatccacctctgacgtgaaatggtcagcgttactcggacgagacgtgttacttgatgacgccgaaggcttctccacgtgctgcgaccgagacatcatcgaagctgtaatggggttacacgcacaaatgactacagtcacttgttactctaacagatgcgatgtctatagaggtttgaacacttcctcgaccttggtgtaaggtacaccaatggctacatacatttacgaccgccacgacgggtggtccatacacattcaggattcctattggctgaaagcagcatcttttagccaatgagcgacatgtatagcattggaattctgccaaccagccgttggcagattcctagtttagaatattacatttagaggaagtcagaaacataaaacaaaaatagcagttctcatcttttaccaaaacacgctacttggagtttttatcttgtttaaagtatactcgtggatctcgagtatacttaactcaagtaaaagaaacctacgcttcctcatacacgtgcgcatacgtgtaagccgtagtagtgagccaaggtaggcccactacacctggtagcactttgtagtccgtccaacgaccgactacctgaacgttcgtacggagctgtacgaacgaggagccgagaaccttttcatgagcgcggaggtgcccatggaaagctccacttcgcctgcaactcatgttgcacgcgctaactgcctccacctgtcagatccagagtggtaggcactccaacgactgtcaacagtcattggagaagcggctgtagctgtaatgctgcgcacactatcgccgacggagcaacacggtgttgctctgggattcatcatgaaggagcagcgtgatgctgcttcctctatcacggtggcgtcggggacgacaccgcgcgagcaaacgttgaagctaaacgtgagcaactatgtcggaagagacggcgagcctctcctccgttggcttgttgaactcgacactgccatcgcggctcgacgtatcgtcgacccgttgtccaaggttgcgttcgccatgtcatgtcttggcggacgagcgagaagttgggcgtatggacgccgactctctgatcctacgtgcttcagcacgtatgagggtttcaaggaagaactcagacaagcgtttgatcccccgcaaaatgagtttcggtcgagggcagagttcctcgacctacagcagggtaagcatgatgtccatgcttacgcgcagaaagcacggtacttggtctcgaacattgtgaccaacccgatagacgaggcgaccaaggtcgtcacgttcatgaagggtctgagagatgggcctgtaaagacctatctcttccgtgactacccaggtactctcgaagctgcgattactcttgcgatgcaggaggagtttagtctgaggcaggctaaactacatgcgaatgcgccgaggctgcaaccgcctccggtcgcgatagcgggaggtccggaaccaatggacctctcgtatgcaacggctgttggttatcaacagcaacaaggaagtaatgtacgatgcttccgttgcggaaggaccggtcactatgcccgagagtgcacggcacccgtgcaccgagatggtggtcgacgcggcgatgccgggcatcgtcgtggataaacaaaaaacgctggaacccagtaggcgcggggcgccctactggtaatgcagttccgcgtatcgaccttggccacgcgacactgaggacggcagcccccagtgaggttcattctcactgcaagaagcaagatgacaggcctgaccttgtcatcctgaatgtgaactcgatgagagcaagcggctctctccgtgctttggtagattctggcgcgtcgaagaactttgttcgactgcgaagtctatcaaggcttgacttcgaggatttaaagatacctcgaagtatgttggaagtacgactggcaacgggtgccgtcgtgaagaccgagaagcgcatggtacgcgtgcgcttcacgtatgaagatcaagcgtttgtcgagatctttatcgtcctggatctggacgataagtttgacattgtattgggcatgccgtggcttgcacggcatgatccggtcatcgattgggagaagcgcactctcgtgcgcttcggtcgcgacagcggaacagtgagcgatggccctgttgccgctacgcacgcaccgacaggtgcgcgcgactccccactcgagacagaggctaatgccgctgtcccggagcgccctgggcgcgcgcgagcacacgcgcaagagcagcaagcgtcggcgtcgccgccgacggcgaaaggagaaaatgtgttgatctcggagatcgacacccgcttctcagcgaatcaggaagagtttccgacccaaggggtacggatgacgcaggcgagtcgcacacctcagccgtggaggctgacgcgattctgattggatcagttttggccaataataagagccaaggtgacgaaacgccgtcgactccgggagtcgatggcttgggtgaatttgattcgtcggctcggggagccgacgcaccctccgtaatggagggctccgccaataacaggcgtcgaggtgaagatggcgtgtcgactccgggagtcgacgctgcaagcggtgcggacggttgcaaacgtcccgcaccggaaaaacttgcatgctgtcgtgcagccgggttgcacgacgaagcgccgggcgaccacgccgggcttgaagccgctcgcccgcgggatgagcccgccggcggtactaaagaagaacacccgttcacggctgggcctggacgaggtcaagaaccaagcggagccgggctccgcaaaacaagaagacagcgcatgcgaagatcgctgcgcaagtctcggcctggggccgagacgctacaaggaatgtctgccgggcagacgggggctgagaagccggacgtcgagacgttgaacgtcttgacgcgtacctgtgccgggttccggtacagggagatgaccctcgctaaccctccgacgcaagcgtcggagttgacttcgcttccagtcatgagctggaagcgcttcgcgcgtgacttgcacgatggacgcatcgagcaaatatgcattctctcggacgccgagagaacgaagagcgagaatgaagaactgaggcagttcttcatggagaccaccactgagagtgaggacactctcagtgcgaagactaagaaagagcgctttgaggagcagagctgggactcgctgaggtcgagtcccttctacgagattctacgggagcacgcggacgtgcttccggaagagatccctgcggagcttccgcaggacaagggaatccagcacgagattgatctcgtgccggggacgaagtactgtgtcacgcggcagtggccactgccgcgagagcaggtcaaagcgatcgacgacttcttcgaaagtcgtctcaaagctggacaagtgcgggaatcgaaatccccgcacagtgctccgacgttctgtgtcaagaagccacagggcggctggcgcatcgttcatgcgtataacaagctgaacgatgcgacgataccggcgcagacgccgatacctcgaaaagatgttatcatcgattcgatggccaggagcaatatctacagtgctcttgatctacgcgatgggctctatcagatcctcatgcgtgagagcgatatccctctcacggcagtgagcacgccgagcggcatgctatgggagtggctagtgatgccgcagggtctgaagaacgcccctgcgaccttcaacaggtgcgtgacgcacttgttgcgctcggtgcgcgacttcgcaccgagctacttcgacgatgtgttcgtccacagccgggctgcggacggggtgagcgatgttgagatgctcaaggtgcatctccggaagctgcttgcgctcatgcgcaagcacaagctctatgcaaacctgaagaaatgcatcttcggggcgagcgagatacccgtgctcgggtgtctcgttgggaagaacggtgtccgccctgaccctgagaaggtcagagtgatcaatgagtggccgacgccgtcgaacgtcaaggaactgcggcagttccttggcttggccacgtacttgtgcaagtacgtgaaggactacgcgggcatgatacgcccgctgtcacagctcctgaagaaggacgtcgagtgggtttggactgctgagagtcagcaggccttcgatgcagtcaagctgggtttgactgaggcgccgatcttggcggtggccgaccaagatcgcccgttctacgttgtgtgtgacgcatccgacttcgcaatcggatgtgcgttgatgcagcacgatcacgagggtcgtgatcgtgtcgtctactaccaatcgcgccagctgaagccagctgagcgcaactacccggtacatgacaaggagctccttgccatgaagtacgcactcgcgaagttccgagtgtatctactcggaagcaaacggttcgtggtctacacagaccacgcgtcgctgcggacggctgtgaagtcgccgcacatctcgcaacggatggcgagatggctctcattcttcgcagagtataacttccgggttgagtataatcccggaagactcaacgcggacgcgaagctcttgctggcctacggctcagcgccttctgaccaagctcgtcagaagctgccgaagcatcttcgtgctcgtgcacaccgttaccgggtgcacgatgggttattactctacagtgcagtcgacgacaacgcggaccgcgttgttgtgcccaatgaccatgacctgcgactcaggatcatgtacgagtatcacgatgcaccgactgcggggcatccgggccgtgagaagacataccttcttctcacgcgagacttctactgggcccaccagtacaaatgggtgcgcaagtacgtccgtgcttgcgaggtttgtcaacgtgtgaagcctgcgcctttcgcgcaggctcccttgcagtcactaccaactccacgagagtgttggcagtccatgtctttggacttcgtgttcggtcttcccccggacagtcaggggaacacgggcgttgtggtctttgttgaccgcttcagcaagatggtacatcttgctgcggtacccgctgaagtgactgcgaagcagactgcacgtctgttcgtcgacatggtgtttaaacaccatggcatgccgatcgacattgtatcggattgagacccgcgcttcactgcgcacctttggcaagaagtgtttacacttcttgggagtcaactttcgatgtcgactgcggaccatccgcagacggacgggcagaccgagcgcgtgaaccgcgtgctcgtagacgtgcttaagagctacgctcactcgttccaacactggagcgagtgtctgccgatggcggagttcgccatcatcaactcggtgcatgcctcgaccgggcttacaccgttctacgtgaatgccatcaggcacccacgcctcccgagtctactcgggatggtgactccttccttaagtgggggaggatctacgactgcaacgcagcagccgcagaatgccgctgacacttgcacagtgtcagccgcaacgacacgaagtaaagccaagaaccgcgcgtctgtacagggcacagacaccgacaagcgcacgaagaacgtgtctgtgcggggcacagacaccacgaagacgaacgcagaggccgggcctactgctggaaacgagctgaacgagttcagctcggacgcaatcaacttcgtgcagcgcagacaagccgtcattcggtttgtccaagacgctattgcagcttctgtcgaccgacagaagctgaacgcagacaatgttggcaggggcaacactaatgaattcgagaagggttcattagtcttgttagctagtcaaaacctgcctaaacatgccgtttccgacttcggggcgagcaagctcgctccgcgcttcatcggaccgttcactgtgctggcacggcacggcaacgcctacacactggacataccgtctagtatgcgcctccatccgacgttctacgttggacggctgaagccatacctgcagcacgagctacctagctcggctgaaccgaagcagaagactcggcggaagccattgtcctctccagcgcgaagtcgcgctggagcagcgggtcgggctaatggtccatctcggccagaacgatcgaggcggtctgggaggccgccgcaacctgagaacactttagagcgccgaacccagcgctctggaactactccacgaccgagttccggtcgtggggagacgcgagatcagggtcaacaccaagttgaccacacacggggcgtgtttccgccaccaccgccgccgattcgtgatgcacacggctcaactcgatggattgttgagcggattgttgatcacagtatcccgagaacgaacaggcaaccagttcgttttcgtattcgttggagaggatttcctccgaaccaagatacatgggagccacggaacgtcttgctccaagacgttccagacttggtgaggtcatacgaagcccaccatgcgctgcatactggaacgtaatgcgagcgctgctgttaacagcagcgcccgaagacacttcgagggcagacataggtacctgcccccgcggcagcgacgcgcttcgcacgttgccgcgcattctactcaacagcagcgaggttctccgctgctgcgccagcggtcttcagcttcgacgcgctcgttccattacgagcgcgctctcttcaacgtcacgtattgaccaagtggtcaatggtggttgacgtgccgggaccggcacgtctaaccttgacggggggatggtgtaacggggttacacgcacaagtggctacagtcacttgttactctaacagatgcgatgtctatagaggtttgaacacttcctcgaccttggtgtaaggtacaccaatggctacatacatttacgaccgccacgacgggtggtccatacacattcaggattcctattggctgaaagcagcatcttttagccaatgagcgacatgtatagcattggaattctgccaaccagccgttggcagattcctagtttagaatattacatttagaggaagtcagaaacataaaacaaaaatagcagttctcatcttttaccaaaacacgctacttggagtttttatcttgtttaaagtatactcgtggatctcgagtatacttaactcaagtaaaagaaacctacgcttcctcatacacgtgcgcatacgtgtaagccgtagtagtgagccaaggtaggcccactacagaagcctccgttgttgggcatgaccgaggcatcttcggtgaaccagccgccgactgcgagcgatgcctcgtaggcgttgactggaagcgaggagtccttggggtcgactgggaacttggagccggcgaccaaatttcaatgattgaagcgtctgaagagtcctcttgtgagcaaaactgcccaggttttgaacaaacgtacgatgttgctggcgatcgattcgggcttgcacaaagttgcgatatgcttctcgcgaagctgctaggcgttttcgggcagattccggccaaatgtattcctacagatcgcacagctcagcaatgacaaagcaactcatgatacgccagccacgaacttacagggatcgactgccactgcgtgggcgtgatatcgctgtcggagcctcgcaacgctcctggagctgtcataacgaagcaaaaatcagtccagcagcacctcatcattatttctatattagaggcgtaccaacgtgcgcggactgggtgggcctcagcttgatcggcttgagcacgaccaggtaaatcttcaaatgaaaactggaggcgcgaaacacacaccgtctgcgcgcgaaagtgggcagcttcccttgaagatccaatttttaaaaatctttgctacatggggatttgctttgatcatatagtgaacacaagtgtctttttgatgcggttgcaagttgaggggctgataaaccccgataaacgatgattaaacgaattgattgatgagatcactttttggtatcatcaaacaattcaagtctaatcacaaggtttagcaacagtttaatctgccctacccctatgaataaagttttttatgtaggttttggaaggcgcccactgggtgcctaccaaaaacggataaaactcgacatagaatgcatctctaaatttgtctctaaatatgaaatatgcagaggtcgggggtcgcctgatatatgcgtcagttgctagaaaaaggacatcaatactgaaagcaagtcaaatctaatacgctgctatgcagcgacccttggtttactcagacgtaaaaatcgtctgagtaaatataagtattgttaaatttaaatatgttgggtgatttgttcgtttttcgtaggcatccattgcgagggacaagaatcctcctcatgcaatatacactatacagtcctgtcgggaaacgcttgggcgcttcaagttgaagttgaagtagtcactcatgttcacgcaaatcctgcggtacccccaacttcgtcaaactcgcatcttaccgaagggcgtgacaacgtcaccactgactacctgagttatggctttcggatcaagcgcgggttcaaccattgcagctgctgtgatgccaattctgcggcgcacccatgtacgggtatacgtgtagctctggttcacgaactttcacatttcctagtcctctatgacccaaacttcccaactaaaggcttcaccctgttaagcagatctatcttatcattcgattgaggcgtgtttacctactgtatgtacagaaggaagactcgtggacagaacatgtagcaccgcgttgcggtccgcaccggcgaagttcaagccgaagtgcaagtgcaagtttccacacaacaatgattgccgtccgatgctgcgctaggtcaagacaccgcctggcgattaaattaatagattaatcgttcttttacggtacctgcacgtacgcattttggtatctgtacatgttaaaataccgccaccgctgctgaaacccgggctgcaccacgttctcttcaaggatatcggtatcgtccggcgagttctttcctgtggagtcctacaccagaaccaaaattggtactcgccaacgctgggcggttgacttgacatgcaaagctctaacggaagcactgtcccgagtctaggacgctacttgtgctccagccctcgtactcctcaatttgcttcctctgaagcacaacaatcaacctcctgctttaacgtttgctgggctcgggaaaccatgaaggacatcgaagccgccactccgggctaccaactccacgcctcgcccaagccgggcttggtccaaggcgacgaggcaccgctcggccacccgtcgatctggctgcttcttgccgtgtcgatgccgcgtatggcgatcaacatggcctggtcggcgcagtgggccgctctgggcccgtacctgtcgacgatgctgcccaactccgccgtgcaagcgacgcagttcatcggtcccattgtcggcgtcattgtcggccccagtgtcggtgttttcagcgatcgtaccacctcccgcttcggccgtcgacgtccgtacctggttattgccggtatcctcagcgttatctgctggatcgccatggggtacacgcgcgaaattggcgaagctctcggtgactctggcaccgacaaccgtacgtggacgtccgtgttcacgatcttcttctacgcgtggatggacatcaccgtcaatatcatccagaccccggccatgcttcttgtcgccgactttgccggtgaccggcagacgaccggcgccgcactaggccaggcttggtcgacgttgggatcaattgttgtggctggctacatccgcacctttggcgctgcctacctcaccatgcactggttcatgggcacgctgtccgtcgttatggtcgtgtgcgtggcagttgctgccattttcgcccacgagacgccactggaccccaactcggtggagaagacatcggcctgggtccaggtcaagggcgcgttctactcggtttggctcggtatcaagaccctgcccccggttctcgtcgtgtacgctatcggcttcttcttcgtgaagtacggctacacggcctacaacggcaacaagggacagtttttcggcctcgaggtttacggcggcacatcggagaacgccgacagctgcgacccctgctcggacgaacagaacgcttacaacgaaggtgtcagtcttgccggcggcgacgccgacctggcctacaacattgtcggctacgtgtactcgtggtgcctgcccttccttgtaagcaagatcggcctcaagtgggtgctcacgctgtccaccgtgccgcagatgttcctgctcatcatggcctgggtcagcaacaagggcttcgatgtattcgttgtcgctatctgtggcgtgacctccgctgtgtggttctcttgcatcgtgccggtcatcatccacgtgatgggtaacgacgtcgagatcggcatgtacgtgggggccttgaactcggccaactgcttcggccagctgctcaatttcgctgtcggcacggctattgtggacacctcactgggctacaaactaccggtgttcctgggcggcataatgagcactttgggcttcctcacggccgcgatcttcatgaagatcaagatgtacagcttgtaagatgtcagtgtcagcaaccgtgcgcacgtcttttgtaagtatgcgaacttaattcagcagcctttggcttggcatatcgccattcaagctccacgcgccagcttcagcaagtgaattgcggcacacgcgatactcatgggtgtggtcccgcaagggcacgtcctcgtcacggcaattagcactattatagtaccaacaccaatatgtagcagcacttttagttgtagatgtttccagccaagtcgaaggcgacctagttgacaatgctctgcgacatcgcaaaactttctgtattagccgcacgcgagtagtcagcaagcgcttgatttagaccaatccgatgctagaggtttgttttggtttggtttgttttcggtcggttcgaaccaaaccgtgaaaccgtaacgaacctggtttgctggtaattttggtttggtttgaactatgaacctggaggttggtttggtttgtttcaggcgtgcggttcctattatagctgggctcacgaacgatcgagaaattgcttgcgtgaagacggatggtgctggtattgagccgttcgtgagcttcgcggctgaagactgcgtgatgcattcgaaacgatactgcacagcgcacgcaaccaaggagcgacgtcaaggagtggctattgatggttttggtgacgggtgggaggtacctcgtggcttgaacacgaccgctacacgagctctgtgtcctctcctccaagtagtgaagtgcacaaactacgtgatactgggtctgtggtgccggggatttcgccaagcgatgacggacgcagctagagcgtaggtctcgatatgggaatcttgcacgcaaatgggggttcaaagttcggagtgccaagttttcgagctggtgacactatcggctgcaccatcgaccaggacttggctgttcctcagttgcgcttctacctcaacggggatgttacactaccgctacgccgaacaactactgcagggggaggagtattgtcggcagcggattcttaggcttcatctgaaatttcgaccagcttcggcatcgcagtatacagattggtgcctgtggtttcgatgtactcgtcttgctagaagccgcagacgcgagtatcctttaatttccgaggtgacttcaggtttcccattccaggatttgacgctttcggtgcttgacttgacttgacgggtggaccccacgtggaccccactgtggtgtgtaccagtaccgaattcctttggagaaaccagggcctttggccctggtttctccgtcggtgtctgggtctggggataaaatgcaagcgagcctattggctaatctcaaatctccatcgagatttgtcggagagtttgcgctcagccaaggagcttttcccaaaaggagtagcgatttgacccatctgtctcaaaaggagtcgttgttgcaaaacgagtagttggggtgcaccacataccatccacattcctgatgcagaccacgcaggtgcaccacgccttccccaaggacattaagccgctggatcagctgcccccccacaggtgacaagttcctggccaagagcttggctgagcttacggagtatctattgtggctgctttgcggctcccgcctccgtacacaagtcgctgtgcaagtcgttaatatacgaaacccagaagagctgagactcaccacgctctctcttgatcgagacgcgaacctcccagccacagacatcaccgggaatattcttgtcgtcgaccgaggagatgacagttgtctctccctcgtcattcgagacggcccctttgggcttggcttttttgtcgtgggtgcaagtgtacgtctgcattgttccactgcttttaacacaacagcgtgtgttggcattgtacgtgtagtcctgcatgaaataggtcgcgtctttgccggagctgaagcgcatgccctccttcaattcagacgtgccgtgttcagcgtttaagtccatgagcgcgcgagccgatgccattgcgatgatgggacgggtctagagcagggagctggttgtgatagcactacgagaaagatggagaatgccagctaaaacccacggcaatgtcataccgcagatagcacatactctatcctacgatcgccaagaatggtatgtggtgcaccccaactactcgttttgcaacaacgactcattttgagacagatgggtcagatcgctactccttttgggaaaccaagcatgtggcaaggctacgtacacgattgtaaaattgagaattgatctaggttttacagcttgtgatactaatcagctcgtcacatctaatacacatctggggatattatcctccatttattctcacccccaacgggttgggaattatatgcaaatcctggggttttcctggttgcccgccttgctgggtggaactatgttacccacctcgccgtgtggaacttggttacccacaccaggagcgcttccagcgactcccgcatcagttatggtctgagtgacctcctgtgaaactatgttacccacatcggaagcgcctgcagtgccttcctcatcacttacggtctgaatgacctcgcgtggaacttgattacccacgccagcgccagcggcgccttctccagcagcccttgctgcctgcggtacttcgttacccgcgtgtggacctacgttactcacctggtaggtgctgtccggcacctccactctcaggccttgtccggcccggtcggagtcgtcgtcagtctcgacggaccccaagaactcattagacgctgctgcgccctggcggccctcgcgcgcgccccagctgctgccagaggtgggaacatgactcaccaaatcgctgtcagagcgtggggggcggctggtcccgatggccttgccgcgccagtcgatccaaggctggtgtttctccagccacggcatgccaaggatcaagtcgtacttgtccatgtctaggaccaagaacggctctgtgctgtcgaagtcctcgaacttgacagtgaggtccacgtggacccgaggtacttctaccaccgtaccgtcggccagtcttaccgagaccagcccgttgcctttgctgcctcgtagcgcatcggcgtacttgtcgcgattgcgtgcgacagtctggcggcgcgcaaagttcttggacgccccagagtcgatcaagattctcaagggatgctcgtatcccggtacactcgcgtgcaccacaagcagcccaccgcggcccttctccgcttcgagagtacagacactctcaggggctaagtccccatggtgtgcgccacccgcacgcctctcatgaagacttagtgtttccccagtagggcgccccgcccctactggtgtccggcgttcccctggttcctggggcgcggcttctgccagcgacccctagagccaaagggcttcgaagagaacttcttcagtcctcccgcgggacaagcacgtttcatgtgcccaagcttgccacagccgtagcagcgaatgtcgctctgctcggccatgcccagatcgatgggaaccggcccgttgatcgctccattgccggagttaccattaggcgcaccgccagaggcagggttgctctgccataccgtggctggggtacgagcctgcttgtggctgtacccctcctggagggcaatctgaatcgcctcctccatagtgtttgcttgcacaaggaacagttgcgtgcgggcaggaccgacacgcagaccgtccatgaacacggtcaccttgatgtgtttaggcagggggttccccaccaaagaggcagtgagcactcgcatctcctggatgtactcatgcagctcgcgtcttccttgtttgcaggcgaggaagcgcgaacgctggcggtactcgtagttcgccggaagaaacgcggcccgcagctgctcgcacagctgggagcatgatgcaaagcatccaggcgtcgtcgcttcgcgcgtatacgcccaactcttagcgcgaccactaaggttggagagcgcaaaggcgacacggagtcgctcgtccgagacgagagccgcgtccatcgcgagctcaacctctcgaacccagaagtgaaggttttctccttccttcccttcgaaggggtgaaccttcagccgcaggggcttcggttgcaccggcttcggcgcggccgcagtggcctgcagcccttgaacgtgggcgatgagccctcgctcgtaggtgtcgaacgcgttgatacgctcaacctgctcagccggcgtcgccgccgctaagctacgcagggcatctgtcccaaagatacctgccatcttacgaacggactcgtactgcgagtcgtccagatggggaaactccgtacgatccatcttggctcactcgatgagaccacatacgattcaggtagtccaatctacccgcgtaggcgtaggattgactacaagtgctaccaagtgtgatggggcacacagcacttcttaacagaggaagcaggagtatacaaactccaagtgaacagccgttcacgtgtccctggtctgaaggggacgacttgacttgaaaagcggtagatctaagactgaatgtatttataggttggtacagatttggcctgcatacaaatcctaagttccctatagtttgtgtcatacaaaatgtatctgttggctctgaggccacttgggtcactatccaggggagtgaccgatgtagccatcccggaatagtgacagggtcactattctatgtaaccccgttacactggtgatcgttatgaaattcttatcgctgccgaaccaccagatatgcatccagggggctagccgcggagctggtagacaggaagtggtcacgtagtgtcggatacggaccatgcgagcgtgttcggcgcgtttcctctcctcaccaaggcgccgtcgcagatctttgacagcatccagcattcgctgacgggtctccaacatcatgcataacaccaccagctgcctggggtcagtcatgtggacgcggtgccggcgcacagggaggcgtcgacgttctgccgggtgtgcggaagtgattgaacgagagttcgcggcttttcgtatcgaaagatatcgagattattttgtgatatttgtccagatctaatgtgcctcatttctgtgtcatacaatctcccatatagttttaatgaacgggacacattgagtcgaccagactaaccgtttaatgcaggttttggacgtcggaattttgaccgaaaatttaatgcggataaaacttataaaactgttattaaagggggcatcaaaccgaccgtgattaaaccgttttatgtaggttttggaaggcgcccaatggtctatgagcttataatggggcaccgaaaggatcaaatcctggaatgggaaaccgaaagtcacctcggaagttaaaggatacccgcatctgtggcttcttgctggacgagtacatcgaaaccacaggcaccaatctgtatgctgggttcgtgactgcgatgccgaagctggtcgaaatttcagatgaagttgaagaatccgctgccgacaatactcctccccctgcagtagttgttcggcgtagcggtagtgtaacatccccgttgaggtagaagcgcaactgaggaacggccaagtcctggtcgatggtgcagccgatagtgtcaccagctcgaaaacttggcactcccgactttgaaaccccattagcatgtagcatacccatgtcaagaccgccatcagcctgccaagttacaccgtagctgcgtccatcatcgcttggcgaaatccccggcaccacagacccagtgtcatgttgtttagacactttactacttggagaagagggtaaggagcttgcgtcgggctctgccgctgccgcgtttgagccacgaggtacctcccatccaatcagcaggctttcaccgtctccgccaaagacatcaatggtcacctcaaacatccacttgcctgactctccttgacgtcgctccttcgtcgcgtgtacagtgcagtatcgttgcgaggcttccagttgcaacacacagtcttcagccgcgaagctcacgtattgctcgatatccgtactatccatcttcacgcaagcaaattctcgacgccgagtgaactcctgcgatagaatatcttgaaaatcttccagagccgcagcaaagcgatcaaactcagcgtcgaggatcacagtctgagaatcgtcatcttgatcctggccaatttggttgtcggacgtgtacgcagtctcgtagttggaagccttaccggtaagtttcttggcaacagcgtaccggcgtgcagctcgaagtcgatcgtttgtgagccccgctaggaacctcccgaactcgattctccgagtgtgaagttcgcgcgtcaccaaatcctggtggaggaagctcgctccgaaggtggcaacctctcgaaggtccttggttgtcgcctccttgagcattgcgagtattgtcgtctccgctaccattttgctggtcagttcgcggcgaagtacaaattgcgggagcttgttctcttcgctgatgtagcgcaccagtgcacgtctcaacggatctgcatgcaagtcttccgcgagaatgagcagacgcaggagatactcactcgtgccgaagatccgctccacctgcagggacgtattcatgatgaggcgctcaagtccgtgccatccattgctgtcacactttttctggagtgccatcacttctcgctgcatgatcttcaccttctcgctcagcacagtcttctgttcctcatatttagcgttgatcttcgcgcgttcatggttcagtagggctgcatgcatctgacgaatatgctggagatcggcctcaagcgtcttctccaattgattttgaatggtctcgagctcttgtacctgcatctgctcgagcctctccgcttgcttgagtcgcaaagtctcgaagatcgatcgaagttgctgcgagaactgctgcttgatgcggttcgcctccacttgctgctgtctttgaagcgccaatcgctcaacaagttgcgggtccttcgcgtagagaatgagacgatcaaagatcggctgctcgaagtggttgaagaccgagatggagtcgtagcgaggtgccgtgtccgtgattatcagcttctcgttcagcgtctgcgccgcgtacaacgtgaaggcctggtgcgacgccgttgtttcgccttccacctgacgccggaacaagtcgtcgatcaccttgcagcaacgacggagctccgctctcgagaccgagcgcgagtatttggggaagttccgaccggacacttccaccgccagcatctcagacgcctcttgctggtacttgtcgaggtcgtacatcatctggaagagttgggtctcgcacgacgtcctcgtgctctcgaggagaggctggtactccggtaaaatccctgatcctgcgttggtcgtgtactgagcttccttggcgatactaacagctttcaggtacaaaacgaacaaagctcggaactcgggcgcctgcagtttctggagtctcgcttccaactcttgcgagtctctcgtgacgctaaactctcgctggaaggcagcggagagtcccgtcacgtccagcttcggatgaaagcaccgtagcttcacgagcagaaggtcttcggataccgtgacgaagtcttcggcgctgaagagctcctccacatcgctgtcgctttcgtcgctgtcccagtcgtagaagatgtcagccggtgggaacgaggagatagaaggagccagggaagctcgtgactggaacatcgcgtcgagctcgcgttccgagttggttgacgctgtgtatgttgaattctgctcaagcgtcgttctggtgacggtttcttggacgattcatctcttgctattccttcagtagacatcacgtaaattgccatgccgattgccttaagcatactacagaattatagcaccagtgcatggaacccttgcgctagtatggcactggcatcgaggcgatgcaggctgtcagcccccatacacaagcactttcatggtggggggggggggcgttgaaccgtttcttgatcgaaagtgctcgctatttccgtgggttctgatgacaccgtggttgcatttatccaaagacaagacttcgttggtccccgtctcgctgtcgcattcacctgcgctagaacttggactgtactgcgtgatttgagtccgatgaaccaagaagatgtggaggtcttctccaaggagaccttcttgacgtcgatcaagcggatctcagagtccggtgcaggcaaccggaatgcgcagaactccaacacaatcgtcatcgaggaagcgccagcgtacgactcccagtcttaccttttgcaacttgtcgtggtctcacgtttgatcgtttcttgtacttcatgatcgcagcatggcattagttcgtgagaagcacgcacagcttcacgatgttgttggctctttatccgagaaaatcagcgcagtgctggctcgacaggagcgagatttcttggctgcgtatcgagcgcacatgtacaacgtccagaaggagctgcacgaaatgcgtgagaaaattcaccggaacgagactgtggagaacaagtccgagaagatcaagaagatcgaagacgagcgcgactggtaccggaaggaggcgctgcgactggatgccttcacgacaacaatgacgaaagacctcaagtacatgaaagaaaacttggaggcgatcgaagaggaccggaactggctcgagaagcagctcaaggcgtgcaaaaagcagaataaactgcttcgtgccgaacttgatgttcgtctcgccgtgcctggaaacaattctgggtcggattctggtggagtcttccctcctttcgacacacagagtaggtcaggctccaaaatgcaaaagcatcgaagctcgcaagatccgatatccgccgcagcaccaacagtaggagctcatggtttaccccatttgaatctggacgttgcttcaacggggcaggcggcgatgttggcagaagagcgagaggaaaaactcaaaaagcagatccacgccttgaaacgggagctgcagcataaatcaaacgagctcacaacgatcaaaaggcagcaacgcctgctgaggcgagatgggggtaccggacaatcgcttcttgagcggtttttcctgcaatgtgttgactcggtgaaggaggaagtgggtcgaagacgcgattgtgggccaaactccctagttgataggaagggggcagcacaacggggtgcacgcttgccagcacccggggacaaacctcgccaaccaagattcgacgttgagctggatgacttcacaccaaatgaccgcgtacgactaatcgaacgtttgttagctcacgacgaggtgctcaccttcctgtacaatcacctgttcccgtctgagaaagcttcagcagttaacatggataggctggaaatcagctggagctcgcagccatccggacgtggcgcacaaagagatgaaattccattcccggtactgcaggcttcagcgagtcttcccgatacatcaagttcatttgcgagtttcgaagccaccagcagcggcaagaggtcgaatccagaaggacagtctgagtctggacagagcgacgtaatcgaagagggaaatcgagcgacgacgcctgtggggagtggggccgctgcagtgtcagcagttcgaagtggatccctgtcgctggaccttttcaccaaggaatacttgaaatcagtgtaagtctctccatgattctcctttcgtagctgcaaactcacctcttcgccttcgcttgtttcatccagcaaaccagcattcaatgaataacaaccacactccgcatgaatacaccgtcacccgcacatctgttattcatgaattgttttctatgtatcaacaacgctcacccgcccacactgcttgtgaactcaagccgatggaagtgaatcggagttagttcgttctgcccgttcaggacaacctgcttaaaagtactgtcctcacgagcggcaagctcgttaaaggttccctgctccaccacacggccatccgagatcacggctgtgcggtcagcgctcttgatagtcgatagtctgtgtgccaccagaataaccgtacggccctgcttagcgcggtccacggcatcttgcacaagtctctcactctctgggtccagagctgacgtagcctcatcaaggatgaggatcttggggcgctttaccagcgcacgagcaatggctacgcgctgcttctggccacccgaaagagcttggccacgctcaccaacaatcgtgtcgtatccgttagggaaagacatgatgaaatcgtgagcgttcgcagtctttgctgcgtggataacatcctccagtgtcgcttcctggccctcagagcagccgtaggcaatgttatccctgattgagcacgcaaaaagtggcggttcctgaggaaccgcacccataagaccgcgcagctccgccgggttgagagtcgaaatgtctgctccatccaaagtgatctttccgccgcagccaacctggtccaactcgtagaaacgtgcaagaagtgacgtgaccgaagacttaccacagccgctcggaccaacaagcgccgcgaacgcgaggacttggtcgacatggacttggacgttttcgctctcgttttggccgtcttcgctttgcagctcttgcagttcgtcgggggttccatgccctgcatagagtaccaggagggcggaagcgcgagctctcccttgcacacactgcacgcgcgttgctcatacttctttctttggcgacgtaggactcgcagtacacctcacggcccttccagtgcgcttcggtgaagtcactgtgcagcacagtcgtgatcccaccacacaacggacagctacacgtcatcgacttgttggcagccttcttggtcgagtctccatcggatgttcgttcggctgtgtcagcaaccttgggttactctcgatcctgacttcgaggatctcgctggcattagccggagagctttgcattacactcgtgcgtcacgaggagggtggcaatcccagcgtccgacaagttgccgcaaccaaattcgtctctctgcttcgagtggatctgcgggcccgtgaagatgcattcaacgccctgaagatccaccaccatcagctgtccgtacgtcttttgccacgtgaagtggctgaatgcttgcgcagtctcacttagattcagcccgtcatcgttgatccagccgttgttgttgttgtactcaccctcgacgtacggctcagtcgtgaacatgaacatcgacgagctctatcctgccttggccggattcttaatctcataccaacacgtgaagataaacccacggcattctcgaccttctccgaaagcgaaaactcggtagctaattgtttagctacgatttgcatctccacatcgttctgaagtttcctcaaaagactgacagttgcagcctttccgcagtagaacttcgccacaaagtaaacacacacacagtcatgaagtacatcacatgggcagcgcgcatcgcacctttcgcgaagcacttaggcaggaccggattgtcgtttattgctgagtgtgcttcaggtccaagcgcttccaatcgatgacctcattgggtctgaggtggagtgaatggcgaacagcatcaagtttcggagatcgatcaacttcgctccagtcaagatttttttgtcttcatcatcttccagtacgtgtggcaagcgagttgtaagtcgaccagtcgggccatagtggtggtagctggaaactccgaatgcaactttcgagtaggagatcacacttcttcctttgctccaccctaaggtgcgcgaccagtttacctactaaaagatatcgaattgggaactttgtttggtttgtttcttacagaagcataaataacacggaaagaaaaaaaaacttgatatttaccacatcgaatgcgactcgaggcacgcgctcaaccgaacggggccccaccttcacgcaacaaactactacataccagcttcagccatcccaccggcggcggcctggcccgccacgccgccaaactggccaccagctccaaatcgcccttggcctccaagacccgcgagtaccccagctccgaatccgccgccattcatgcctccgaggcctccaagaccaccaaagccaccagcaccggcaccagcgccaaagcgtcctccgaagccgcccagttggccgccgaggccgcctgctgctccaaagggaccagctcctccaagtccaccagctcctccaagtccaccagctcctccaagtccaccagctcctccaagtccaccagctccgccaagaccaccggctccagctccagcaccaccaaatccgccgacaccagctgcacccgcagcagcgcctccgttgcgggacgtcggcccggaaatgcctggcgtcgtcggcgcaggagtcacaggaccaccgttgcccagacccgtcgtacccgcgacgcctctcgccccagcaccaatgcccctggcgccattcatcaacccagttgtggtcgtgccggcctggccaagtgcagcagcgccatctccgaatccagcgctgggctgtccgaagccgccagcacctccaactccacccccgcccagctgaccgaagccaccagcaccgacacctccgacacccgcgagacctccgctgaatccattgctagcaccgccgccaagaccgcccattgcgccgcccatgccaccgagagcgttgcctgcgccaaattgctcgcggtcacgaggcattcgccccatgcgcatcggaccgcgcggaccttgggctagagcgccgccgttgagcaaggcgagcacagcaattgcgagtgtaagtcgagtcgccatgacggtggagagaggagcgttcttggtttggtttgctgtggggtggtgatcaccgcgaatgtcgggagaacacttgatgctgaggtcgaaattggaaagtgagagttctgcaggtcggcatcaaccccttcagcactaagatttagtttggggtaggaagccatccaccgttcaatccaggaagacatgctgatcggaacctccgagtctctcgtctgactacctccacatcatcttccttaattaagagcgacacccgacacaaaacgacccgaccgcccatgtatcaaacgctacttccggtgacttctttccctgtggaagccatcgctgtggcaaaacagcgtacacaagcccagctaatggaagaaaccaagcctgccctggacgcacggttttaagaaataccacaatgctaaccaatacattgtgcacaaataatcatcacggcaagtgaacaattgatcactcacggatgtgacgtgttgcaccttgaggcaagtataacacggtagactgggagctggaactcccaccaagaacaacgtgtattactggttccttgggatgctaattgagaactgatactaatctactgcctgcccttacctgccattgctggcagcccaggaaagccaggcagccaatcccaagcccgatcatgggtatccagtagtggcgcctagttaagctttgctaggatacaggttgtggattcgccaaccaccacaacggaatggattcgttctacgagataataccatggtattcaccttctacaccgagcaatccacagaggaggactttgttcgctcgatgggaatacactcaggaaatccaacttacacggaatcttggaagtagcgtccacgcaacagcctcccacagcgaaattcccgcgcgccccaacaacctcctaggtgtcgatcactcgagtgtgcagcgagaattccttcgcaaacgtttatgtcaggagggtagtcctgaggaaactaaagacgtctaaaggacgcgcagggattcgatctccagctccaagtccgcctgtgcctctgaactatcgacgccgtacaacagtgtagatatcaagcggctatcgtttagagagtttcgacgaggtactagacagtattagagttgacaatcaagcttcacgggccaattcagtgaccatttcatgaagccagtactacatagtagtaccagtcaaagtcggatctttacggcatccgcgacgtaggaaacgtaaacttgagagtgaggccttcttgccttgaatattttgttcgttagaatccctgcctacaggtcctactcaaatgtagttgcacgaagaggaaagacacacccttgagcgccgccgctccgataacggggcgattcagccagagttttggcagccaacttgactttatcttccgccctcactcctgctgcacgtgccctcgtgcagaactgtccacttgttaccgctattgcagttctcatggtcgaacacgcaccgattctcgtacgtgacgccgttgcttgcgcaaatgagtggggcattctcggggcatggaagccggtcacaggcggaggagctatcatcggcggagatgccgacgatcacgagcgaggcgagtacaaagacggcagcgaacttcatggtggagtacttcgcgacgggggcttgactggcttcttgcaaatttgaaactgatcaaacccaacttttttcggcttctgcagctcctgccgaccaggcacgcaacacattcactatgattccgattgggatgggaagaactgaaagggtgagttccgtgctaaatgtttggctgacgatatcaaatagtaacggtaattaggttttagggctgaagcccgcagaccacaatcacacacgcaaagtacgcatacgcttccacgccaccgcccggggcgggacaccgcctcgagagctagagcccccatggccattgctcgagtcatttggtgggcgaaaccgattgctggtgacaatcggtttcgctaggtataaagtaaccatagtgccctgagctaaaatcttggggcagctggggcaaaaaataatggattgtgattggccgagaagttatcctacttgacttgtaacaccccctaacgagtacgccgtcgcatgtgagttcgaaccacgccagcacacatgttacatgtgtagtgtgacatgtatgccgaaatttctacaacgattgtacagtacaaatctcctcgtacgatgctacatgtatgcattcgggattggtagtgcaaagctgtagctgatcgagaccggggtgcgaacaaacaccttttggggtgacagcaaaacgaggagaccggggtgccaacaaacactttttggggtcaaaacaaaacgaaatggggcgccagcaaaaccaagcgtgcgccagcgaaataaaaccgccgttttggggcgccagcaaacagatttccgggcgtcagcaaaatggatttgcttttggtgcgcaaccggggcaagccccgagagcataatcgcgccagtatcctaaatgatgatttgctcgaatgagtcgaattattctgcatacccataccaggttaaatcgaccgagtcgacttatagtgcattcccaattagggtttcctcgacactgtcgagttaaagtgcattttccagtgctgctgcttcatcttcaacttcactgcagttccaatgtagttttttttcggttgagccggcgtatcgtgcattattagtcgcgacattccaacgagggtcagctcacgatggattgctggataacttagcatttcaactctatgcgggttgatgaaacggactagttcgcacaggtttacaaaatcgccacttgaaaaaacgatttactcattaaccaacactcccttttcacaaatattgtataaatgaaagtcaacaggtgtatgcgaagttttaataggacggagttatggcgtagttgctgtaacaagtattaccagcttgatatgtatgaagcctaccacaccacgaagaaggggagtcgaaacccaaaaacgaaaacaattatccggttaacgcataaaaaaagtagcatgaagagtaagtaagtaagtctaagtttaccgcgcgagagttttttctctttaacaaagcattaatgcatctgacgtagatcgagttcgcgatgaactcagccgcacgttgcatttctcggcagagttgaagaaatagtatataatattacttagggtattattcaaatcactgacaattgagtaaatttgcaggataatttccagttcatgaaaccactggcacagccaaaccaccgctgctattgctcgaacagtgaacatatcgtcgtaggttacgattaagcaggcattcacactctttgataagagctaaaatatctatatactcaccttttggctttgtacggtcatatttgttttgtaagtattttgcaatacgccttggcgaaggctgcaaatgacgtggttgcccgactgatcgatgcgtacatcattatggatcaactgtatgaaggcactcacaattaatatagcgggccacaacatcatttatttcatcttcaaaatcatctaacacttgatctagctactgcggtagccgtcattgcctcaattccattgtattagtatcgtgcaagccaacctagaggaatgatctagactactgcacttggatcgtggatatatatatatatatatatatatatatatatatatatatattaagaagcaacatcgaacagttctgtgatcttctaacgtagatcatgattgacttggattaatggaaatattgcagtagacacgccagtatttgtacgttgtgcaagttcactgatatacctaccggcactgtgccgaggcaatttaatgtgtccaagatgttatgtaaaccgcgctagcttgcttattctgtttagtttttttatatttcaagattttttaggagcagcgaacctctagttatggcatgtaaaactagcagatacacgtggcgccttagctgcacttacgaattaaatgttgcttctacgacaacattaagctcgtgcacccgacagtataccaccacaatagcgactatatttttatccggttatcggtagcacgttgcagtatgcaggtcgatagagctaccagacacatcttcctaatggtgaagacgttagccccctgagcagcgagttgtactatggcatgtcatggcagtggttaagacccacatattgatgcgaagcttcatacacatatatgccgacactacctagctgtaccacaaatgcttctgtatgaacacatacgaggggatacactgagttattataccggattcgcattacctcgcgccgagttatttagagcctatctcacaacctcagtcacgcatcgatttatccggcatttggcagcttcatgtctacagatgtggcctacagctagaccggccggccgacttaactataaatatgatacttcaattgagcaggatatcaatctagcaaactcaagaagctcaaccggcgcttcctcgtctatctccacgctcgacttcatatgaatattgtcgacttaacctgcatcttgaatgcagatttactcgacaatgtcgacttaacctgcattgtgaatgcaagtttgcttgaccggttggcttaatatcaatacgcccgacgtaactgacatcttagatgccagcttagatttttttacattgaacgtagtgcgaaacacatgcaactggcggtgaatgcataactgggggcagttgctgtaagaggggttatgtacgcctgtgttcgtattttgctggcgccctgttttgttttttgctggcgctattgaggacgcgttacttttaccaaacgatacagtagctacaccaccacaaatctgtggcagcaccacaaagctcgggaaaacaccaaacagtgccgtgaatacaccatagatttgctaaataggggcatatattgggaatcccttggcttactttttgggagggattttccaggttcgactcagcaagaaaatgaccaaaatataagctaaaactgggtaggggggtgtcggaccttgctcaacaaatacatcgtacttagagaaaaatcaacacgatgcagcccccttcccggtgtggtggcgaagccgagagggcgaagcaggaagggctacgtctcgggcgcgcttgagcagcatctgcaccgcaaccacccgcagtagcgtgggcgccctcgatggtatctcggaggtggcgttggtggccgctaggtgcgggctagcgaattaggcacgcgacggcagcacaataggcaacacgcatgctaccgatctcatagctgctacagatgccctcgcagacagcttggagggcgccccactgccttcgagacggcgcctgttgcgcacacacgcacggacagtccttgtacttaagtatatgcatacccgcgcccgcctgcggctatggcatggtgaaccagagctacgcttcatcgaggcgagctcgcggcactccgatccaaggcccgaaggtgtcgggggcaaagtatgctttcgcaatgtcgaacttgaacttcgaaataagcagctcatttcacaaataagccacttagtgccttaattcggaaatgagcagaaaatatcccaaaaagtaagcaccgtttttgccaggttcgacccacctaatgtgtgcgtaacttgcgacacgctgcacatgtagtacatgagtccgggtcgccagtgtaccaactttggaccataaacaaccttctttgggacaatggcaacctaaaaaagacgagaacaaccaaaagagctggaaagtgatcgtcaacaaccactttttcgatcactagcaacctgtcctttctactgccctttctccaggttcctgcgctaagccgggcgcctgcgaatggccgctacacaaactgcatgtacatgtacttgagctcagtatagctttgcctggttcaaattcaaaataactcgcgcgcgttaaaatggtccagatgcttcagaataacccgcgcgagttaatttgaattaaattactcgcgcgacatcataaagtaagttgtattaatagactccggttgcgcatgcgtataggcagctattaggagttgttataatgtggcgtcatgcgaggtacggagctgatatgaggccaattatactgttttaaattgaaatggtacgtactagagtatactgtactgtgagtttagtaaagggtaattcatgcattatacgtgagcatttcggagttcaacccaagcacggttgccacaaagcaatccgtgtgaacaaatgcatacatttagtttgtcttaggatgccaggcaccgcaatgtatcacaacatacccagattgtcccttacatgtgagtatatgccgattgagtgagtaaaacattttagtaaggttcgcaccagttcctgcctctaagccaccggatagccgcttcctctgttgagatggtagtggttgtgtatggttacgacgcattttttgattttatctgtgtggagcatttatacagaacttgcagctctactcagagattcgataatatatcgagagtagttcggaaggtatcacctcgtattctagcgcctcgtgctgaaccacctaagcgtccgttatgctactcagctagcgtggataccttgcatgctaaagtatataatgggtcttctggcatatttcaagtggcaacgtataaccctcaaaaatactcagggaaatttatcaggcttaagaatttcagcgagccaaccagcatacttaagtattttgttttggaaataaggtatatagagttcacttacactagtaaacgagtatccatagccataacgctcactgcctcgatgtttatgtgtttaggcaagttttcacaagtgacaatcagcacaatggtccgcattggggtttcaaaccacgaaccatttcgcactgcatacttttaaataaaggcgttaggactcaaccaacctctctataactactattcctaggcgcgttgaggtgcaactacaacgtctgaacttggagcaatatgtatgtgtgcactacgatgcgaaaattcgctgggaattgtagctatatagtgaccgacgggtaaatattaaaggcgcacacccttgctgtgagtggcatttgagctaactgtaagtcgtgtgactttccagtcaaaaacgcttgctcaagtagtatatcctacctcttcaatacgagctttccacaataacttcactaaaacagacttgttagccccctcatgaacgttattgctcgttgtgcagttacatcgtagccgacgttatagatcaaatttggaatttgaatttgttgggcgttagacggctatctaccactaccattacgatgcaccggtgtagcctcaccaacagtccacatgcctcgaggacgcgagtctgcggtagtggtccacgaaattatagtccacaatctaactcgctaagaacgatgtctgttggttcattgctatttacttgtgcagttagttgactatagtctctgtacactcgatgtccctcgttcttattcgaatccaacactctctggggtaatgagcattgttggtaccattcttgcaagtttttacaggattgaatgttaacggtatttcacccagtcacacagcttcgttgaaatatctaagtccattttctcacttcaccaacctgatcatttagcaactttcgagcttgacgcatgtagctgttatgaatcaaactaactcgagcagttttgaatccactgctcatattaactcgcgcgagttgtttgaatccactacttcatattaactcgcgcgagttattttgaagtagacattaatcattcttagaggtcaataggcatgtcggcacgcggttggcaccgtcctgttcgctgctcagctcgccgccacctgtagacaatgcctgcgtccttttgggataccgcgttggttttggtgttggtggaccgcgacacgaacttgcgatatgcaatgtaatacaccgcacagaaaagcaaccacttttaagtacagaaccgagtagtacagcgcgcgagttaatatgatgtagtggattcaaaacaactcgcgcgagttaatatgagcagtggattcaaaactgctcgagttagtttgattcataacagctacatgcgtcaagctcgaaagttgctaaatgatcaggttggtgaagtgagaaaatggacttagatatttcaacgaagctgtgtgactgggtgaaataccgttaacattcaatcctgtaaaaacttgcaagaatggtaccaacaatgctcattaccccagagagtgttggattcgaataagaacgagggacatcgagtgtacagagactatagtcaactaactgcacaagtaaatagcaatgaaccaacagacatcgttcttagcgagttagattgtggactataatttcgtggaccactaccgcagactcgcgtcctcgaggcatgtggactgttggtgaggctacaccggtgcatcgtaatggtagtggtagatagccgtctaacgcccaacaaattcaaattccaaatttgatctataacgtcggctacgatgtaactgcacaacgagcaataacgttcatgagggggctaacaagtctgttttagtgaagttattgtggaaagctcgtattgaagaggtaggatatactacttgagcaagcgtttttgactggaaagtcacacgacttacagttagctcaaatgccactcacagcaagggtgtgcgcctttaatatttacccgtcggtcactatatagctacaattcccagcgaattttcgcatcgtagtgcacacatacatattgctccaagttcagacgttgtagttgcacctcaacgcgcctaggaatagtagttatagagaggttggttgagtcctaacgcctttatttaaaagtatgcagtgcgaaatggttcgtggtttgaaaccccaatgcggaccattgtgctgattgtcacttgtgaaaacttgcctaaacacataaacatcgaggcagtgagcgttatggctatggatactcgtttactagtgtaagtgaactctatataccttatttccaaaacaaaatacttaagtatgctggttggctcgctgaaattcttaagcctgataaatttccctgagtatttttgagggttatacgttgccacttgaaatatgccagaagacccattatatactttagcatgcaaggtatccacgctagctgagtagcataacggacgcttaggtggttcagcacgaggcgctagaatacgaggtgataccttccgaactactctcgatatattatcgaatctctgagtagagctgcaagttctgtataaatgctccacacagataaaatcaaaaaatgcgtcgtaaccatacacaaccactaccatctcaacagaggaagcggctatccggtggcttagaggcaggaactggtgcgaaccttactaaaatgttttactcactcaatcggcatatactcacatgtaagggacaatctgggtatgttgtgatacattgcggtgcctggcatcctaagacaaactaaatgtatgcatttgttcacacggattgctttgtggcaaccgtgcttgggttgaactccgaaatgctcacgtataatgcatgaattaccctttactaaactcacagtacagtatactctagtacgtaccatttcaatttaaaacagtataattggcctcatatcagctccgtacctcgcatgacgccacattataacaactcctaatagctgcctatacgcatgcgcaaccggagtctattaatacaacttactttatgatgtcgcgcgagtaatttaattcaaattaactcgcgcgggttattctgaagcatctggaccattttaacgcgcgcgagttattttgaatttgaaccaggcaaagctatactgagctcaagtacatgtacatgcagtttgtgtagcggccattcgcaggcgcccggcttagcgcaggaacctggagaaagggcagtagaaaggacaggttgctagtgatcgaaaaagtggttgttgacgatcactttccagctcttttggttgttctcgtcttttttaggttgccattgtcccaaagaaggttgtttatggtccaaagttggtacactggcgacccggactcatgtactacatgtgcagcgtgtcgcaagttacgcacacattaggtgggtcgaacctggcaaaaacggtgcttactttttgggatattttctgctcatttccgaattaaggcactaagtggcttatttgtgaaatgagctgcttatttcgaagttcaagttcgacattgcgaaagcatactttgcccccgacaccttcgggccttggatcggagtgccgcgagctcgcctcgatgaagcgtagctctggttcaccatgccatagccgcaggcgggcgcgggtatgcatatacttaagtacaaggactgtccgtgcgtgtgtgcgcaacaggcgccgtctcgaaggcagtggggcgccctccaagctgtctgcgagggcatctgtagcagctatgagatcggtagcatgcgtgttgcctattgtgctgccgtcgcgtgcctaattcgctagcccgcacctagcggccaccaacgccacctccgagataccatcgagggcgcccacgctactgcgggtggttgcggtgcagatgctgctcaagcgcgcccgagacgtagcccttcctgcttcgccctctcggcttcgccaccacaccgggaagggggctgcatcgtgttgatttttctctaagtacgatgtatttgttgagcaaggtccgacacccccctacccagttttagcttatattttggtcattttcttgctgagtcgaacctggaaaatccctcccaaaaagtaagccaagggattcccaatatatgcccctatttagcaaatctatggtgtattcacggcactgtttggtgttttcccgagctttgtggtgctgccacagatttgtggtggtgtagctactgtatcgtttggtaaaagtaacgcgtcctcaatagcgccagcaaaaaacaaaacagggcgccagcaaaatacgaacacaggcgtacataacccctcttacagcaactgcccccagttatgcattcaccgccagttgcatgtgtttcgcactacgttcaatgtaaaaaaatctaagctggcatctaagatgtcagttacgtcgggcgtattgatattaagccaaccggtcaagcaaacttgcattcacaatgcaggttaagtcgacattgtcgagtaaatctgcattcaagatgcaggttaagtcgacaatattcatatgaagtcgagcgtggagatagacgaggaagcgccggttgagcttcttgagtttgctagattgatatcctgctcaattgaagtatcatatttatagttaagtcggccggccggtctagctgtaggccacatctgtagacatgaagccgccaaatgccggataaatcgatgcgtgactgaggttgtgagataggctctaaataactcggcgcgaggtaatgcgaatccggtataataactcagtgtatcccctcgtatgtgttcatacagaagcatttgtggtacagctaggtagtgtcggcatatatgtgtatgaagcttcgcatcaatatgtgggtcttaaccactgccatgacatgccatagtacaactcgctgctcagggggctaacgtcttcaccattaggaagatgtgtctggtagctctatcgacctgcatactgcaacgtgctaccgataaccggataaaaatatagtcgctattgtggtggtatactgtcgggtgcacgagcttaatgttgtcgtagaagcaacatttaattcgtaagtgcagctaaggcgccacgtgtatctgctagttttacatgccataactagaggttcgctgctcctaaaaaatcttgaaatataaaaaaactaaacagaataagcaagctagcgcggtttacataacatcttggacacattaaattgcctcggcacagtgccggtaggtatatcagtgaacttgcacaacgtacaaatactggcgtgtctactgcaatatttccattaatccaagtcaatcatgatctacgttagaagatcacagaactgttcgatgttgcttcttaatatatatatatatatatatatatatatatatatatatatatatatccacgatccaagtgcagtagtctagatcattcctctaggttggcttgcacgatactaatacaatggaattgaggcaatgacggctaccgcagtagctagatcaagtgttagatgattttgaagatgaaataaatgatgttgtggcccgctatattaattgtgagtgccttcatacagttgatccataatgatgtacgcatcgatcagtcgggcaaccacgtcatttgcagccttcgccaaggcgtattgcaaaatacttacaaaacaaatatgaccgtacaaagccaaaaggtgagtatatagatattttagctcttatcaaagagtgtgaatgcctgcttaatcgtaacctacgacgatatgttcactgttcgagcaatagcagcggtggtttggctgtgccagtggtttcatgaactggaaattatcctgcaaatttactcaattgtcagtgatttgaataataccctaagtaatattatatactatttcttcaactctgccgagaaatgcaacgtgcggctgagttcatcgcgaactcgatctacgtcagatgcattaatgctttgttaaagagaaaaaactctcgcgcggtaaacttagacttacttacttactcttcatgctactttttttatgcgttaaccggataattgttttcgtttttgggtttcgactccccttcttcgtggtgtggtaggcttcatacatatcaagctggtaatacttgttacagcaactacgccataactccgtcctattaaaacttcgcatacacctgttgactttcatttatacaatatttgtgaaaagggagtgttggttaatgagtaaatcgttttttcaagtggcgattttgtaaacctgtgcgaactagtccgtttcatcaacccgcatagagttgaaatgctaagttatccagcaatccatcgtgagctgaccctcgttggaatgtcgcgactaataatgcacgatacgccggctcaaccgaaaaaaaactacattggaactgcagtgaagttgaagatgaagcagcagcactggaaaatgcactttaactcgacagtgtcgagtaaaccctaattgggaatgcactataagtcgactcggtcgatttaacctggtatgggtatgcagaataattcgactcattcgagcaaatcatcatttaggatactggcgcgattatgctctcggggcttgccccggttgcgcaccaaaagcaaatccattttgctgacgcccggaaatctgtttgctggcgccccaaaacggcggttttatttcgctggcgcacgcttggttttgctggcgccccatttcgttttgttttgaccccaaaaagtgtttgttggcaccccggtctcctcgttttgctgtcaccccaaaaggtgtttgttcgcaccccggtctcgatcagctacagctttgcactaccaatcccgaatgcatacatgtagcatcgtacgaggagatttgtactgtacaatcgttgtagaaatttcggcatacatgtcacactacacatgtaacatgtgtgctggcgtggttcgaactcacatgcgacggcgtactcgttagggggtgttacaagtcaagtaggataacttctcggccaatcacaatccattattttttgccccagctgccccaagattttagctcagggcactatggttactttatacctagcgaaaccgattgtcaccagcaatcggtttcgcccaccaaatgactcgagcaatggccatgggggctctagctctcgaggcggtgtcccgccccgggcggtggcgtggaagcgtatgcgtactttgcgtgtgtgattgtggtctgcgggcttcagccctaaaacctaattaccgttactatttgatatcgtcagccaaacatttagcacggaactcaccctttcagttcttcccatcccaatcggaatcatagtgaatgtgttgcgtgcctggtcggcaggagctgcagaagccgaaaaaagttgggtttgatcagtttcaaatttgcaagaagccagtcaagcccccgtcgcgaagtactccaccatgaagttcgctgccgtctttgtactcgcctcgctcgtgatcgtcggcatctccgccgatgatagctcctccgcctgtgaccggcttccatgccccgagaatgccccactcatttgcgcaagcaacggcgtcacgtacgagaatcggtgcgtgttcgaccatgagaactgcaatagcggtaacaagtggacagttctgcacgagggcacgtgcagcaggagtgagggcggaagataaagtcaagttggctgccaaaactctggctgaatcgccccgttatcggagcggcggcgctcaagggtgtgtctttcctcttcgtgcaactacatttgagtaggacctgtaggcagggattctaacgaacaaaatattcaaggcaagaaggcctcactctcaagtttacgtttcctacgtcgcggatgccgtaaagatccgactttgactggtactactatgtagtactggcttcatgaaatggtcactgaattggcccgtgaagcttgattgtcaactctaatactgtctagtacctcgtcgaaactctctaaacgatagccgcttgatatctacactgttgtacggcgtcgatagttcagaggcacaggcggacttggagctggagatcgaatccctgcgcgtcctttagacgtctttagtttcctcaggactaccctcctgacataaacgtttgcgaaggaattctcgctgcacactcgagtgatcgacacctaggaggttgttggggcgcgcgggaatttcgctgtgggaggctgttgcgtggacgctacttccaagattccgtgtaagttggatttcctgagtgtattcccatcgagcgaacaaagtcctcctctgtggattgctcggtgtagaaggtgaataccatggtattatctcgtagaacgaatccattccgttgtggtggttggcgaatccacaacctgtatcctagcaaagcttaactaggcgccactactggatacccatgatcgggcttgggattggctgcctggctttcctgggctgccagcaatggcaggtaagggcaggcagtagattagtatcagttctcaattagcatcccaaggaaccagtaatacacgttgttcttggtgggagttccagctcccagtctaccgtgttatacttgcctcaaggtgcaacacgtcacatccgtgagtgatcaattgttcacttgccgtgatgattatttgtgcacaatgtattggttagcattgtggtatttcttaaaaccgtgcgtccagggcaggcttggtttcttccattagctgggcttgtgtacgctgttttgccacagcgatggcttccacagggaaagaagtcaccggaagtagcgtttgatacatgggcggtcgggtcgttttgtgtcgggtgtcgctcttaattaaggaagatgatgtggaggtagtcagacgagagactcggaggttccgatcagcatgtcttcctggattgaacggtggatggcttcctaccccaaactaaatcttagtgctgaaggggttgatgccgacctgcagaactctcactttccaatttcgacctcagcatcaagtgttctcccgacattcgcggtgatcaccaccccacagcaaaccaaaccaagaacgctcctctctccaccgtcatggcgactcgacttacactcgcaattgctgtgctcgccttgctcaacggcggcgctctagcccaaggtccgcgcggtccgatgcgcatggggcgaatgcctcgtgaccgcgagcaatttggcgcaggcaacgctctcggtggcatgggcggcgcaatgggcggtcttggcggcggtgctagcaatggattcagcggaggtctcgcgggtgtcggaggtgtcggtgctggtggcttcggtcagctgggcgggggtggagttggaggtgctggcggcttcggacagcccagcgctggattcggagatggcgctgctgcacttggccaggccggcacgaccacaactgggttgatgaatggcgccaggggcattggtgctggggcgagaggcgtcgcgggtacgacgggtctgggcaacggtggtcctgtgactcctgcgccgacgacgccaggcatttccgggccgacgtcccgcaacggaggcgctgctgcgggtgcagctggtgtcggcggatttggtggtgctggagctggagccggtggtcttggcggagctggtggacttggaggagctggtggacttggaggagctggtggacttggaggagctggtggacttggaggagctggtggacttggaggagctggtccctttggagcagcaggcggcctcggcggccaactgggcggcttcggaggacgctttggcgctggtgccggtgctggtggctttggtggtcttggaggcctcggaggcatgaatggcggcggattcggagctggggtactcgcgggtcttggaggccaagggcgatttggagctggtggccagtttggcggcgtggcgggccaggccgccgccggtgggatggctgaagctggtatgtagtagtttgttgcgtgaaggtggggccccgttcggttgagcgcgtgcctcgagtcgcattcgatgtggtaaatatcaagtttttttttctttccgtgttatttatgcttctgtaagaaacaaaccaaacaaagttcccaattcgatatcttttagtaggtaaactggtcgcgcaccttagggtggagcaaaggaagaagtgtgatctcctactcgaaagttgcattcggagtttccagctaccaccactatggcccgactggtcgacttacaactcgcttgccacacgtactggaagatgatgaagacaaaaaaatcttgactggagcgaagttgatcgatctccgaaacttgatgctgttcgccattcactccacctcagacccaatgaggtcatcgattggaagcgcttggacctgaagcacactcagcaataaacgacaatccggtcctgcctaagtgcttcgcgaaaggtgcgatgcgcgctgcccatgtgatgtacttcatgactgtgtgtgtgtttactttgtggcgaagttctactgcggaaaggctgcaactgtcagtcttttgaggaaacttcagaacgatgtggagatgcaaatcgtagctaaacaattagctaccgagttttcgctttcggagaaggtcgagaatgccgtgggtttatcttcacgtgttggtatgagattaagaatccggccaaggcaggatagagctcgtcgatgttcatgttcacgactgagccgtacgtcgagggtgagtacaacaacaacaacggctggatcaacgatgacgggctgaatctaagtgagactgcgcaagcattcagccacttcacgtggcaaaagacgtacggacagctgatggtggtggatcttcagggcgttgaatgcatcttcacgggcccgcagatccactcgaagcagagagacgaatttggttgcggcaacttgtcggacgctgggattgccaccctcctcgtgacgcacgagtgtaatgcaaagctctccggctaatgccagcgagatcctcgaagtcaggatcgagagtaacccaaggttgctgacacagccgaacgaacatccgatggagactcgaccaagaaggctgccaacaagtcgatgacgtgtagctgtccgttgtgtggtgggatcacgactgtgctgcacagtgacttcaccgaagcgcactggaagggccgtgaggtgtactgcgaagcctacgtcgccaaagaaagaagtatgagcaacgcgcgtgcagtgtgtgcaagggagagctcgcgcttccgccctcctggtactctatgcagggcatggaacccccgacgaactgcaagagctgcaaagcgaagacggccaaaacgagagcgaaaacgtccaagtccatgtcgaccaagtcctcgcgttcgctgtgagctccccacattggtgttctgttgggtccgaagtagtgtaccaactacatgcagccttttgttgtatctggtggtgaattgcgcgttgcatgtaagatcgtacgaactgcagttgaacgttaagcttaggtcaatgaatgaaatgggtcttatgagtcgttgcatacagtagctccttcatcgagcacaccaacgcaacggcgtgttgactataaaatgtaattattgatttttaaattttaaaaatgaatatacaaatgtatgagtttgaaattgatgtcgtcagacattgtgtaaacagtatctgtagccggacagtacgaaattttggcaatactaaatgtactttactacacaattaattaatttattttatttcaagtgaccatcactcttctttttggtcactccacagtcactgtaacggggtaaatttgagcaaccttacgttcagctccattttgcgcacttccactttagtgcgtggcgcgtgtggctggcagcgcagcgggcggcgtgtgcgtgtcctcactcatgatgctgcggcgtcttcctcggtacggcgtcgtcccccctcctctccctcactttccacccttcctcactctactcacgcgtctcgaaatgctccgttcttgcagcttccaaggcgcgtcgctgtctctggcgcgagctcggatccggcccagttctctgcgctgcggacgctcccagctgctcttttccactctgtccaagtccgcagacgaccaggagcagaaagcagcctctccggctcaggtatcacacgtagaacctccccattgacctcatttccctatctaacgtaaacatccactttaatgcacatagcctccgtcggccaaggcgggcgaggtgaagcggctgctgtcgctgtacaagcccgagaagaagccactggccatctccatctcggctctgggcgtgtccaccttcatcaccatgtgcgtgccctatggcatgggcaaggtcatcgacgtggtcacggcgggctccgccgccgccatgccgctaccgacagtcgtgacgctgctgggagggctcttcgctgctggttctattgctaacgtcatccgcgtggacaccagcaacatgatcggcgagaggatcaccaacagactgagacaggacacgtacgcgtcaatcctacggcaggagctgggcttcttcgactcgtcgcgcacgggcgagctgctgaaccggctgagcgcggacacgacgctgatcggcaaggtgctgagtgacaatgtggcgggcggactgcgcagcactggacaggcgctgggcagcatcaccatgatcttcatcacgtgcccgaagctggcgatggtcatgctgtccgtggtgccgcccattgcgctcggtgctgtgagctacggacgatatgtgaagaagctgacgaccaaggtgcagacccagttgagtgaagcgaccgaagtggccgaggagaaactcggcaatattcgagttgtgcggtggttcgcgaaggagccgcatgaggtggaagcgcaccgtggtaaggtggatgaagtgctggctttggctcggaagcgctcgctcgctagcgccacgttctttggcggtgtggatttgggcgtgaagatgagcatgttgggtgttcttggatacggaggtcaaatggttgtggatggagtgctcaccagcggcgacctcacttcgttcttgctgtatacgctgtatgttggattctcgttcgctggcctttcttcattttatgccgagttgatgaagggcatcggagcctcctcgcgtgtcttcgagctgcttcaacgccaaccgaagattcgagcaccagagggaggttgggcaccattaccgatgccgttcacgggtcacattcggttccaggacgttgcgtttgcataccctacccgtcccgactcgcagattttccgtgacctgaacttggaggtgctacctaatgagaccctggcgcttgttggtccgagcggctgtggtaagtcttcggtcacgtcacttcttgcacgtttctacgagttggaccaggttggctgcggcggaaagatcactttggatggagcagacatttcgactctcaacccggcggagctgcgcggtcttatgggtgcggttcctcaggaaccgccactttttgcgtgctcaatcagggataacattgcctacggctgctctgagggccaggaagcgacactggaggatgttatccacgcagcaaagactgcgaacgctcacgatttcatcatgtctttccctaacggatacgacacgattgttggtgagcgtggccaagctctttcgggtggccagaagcagcgcgtagccattgctcgtgcgctggtaaagcgccccaagatcctcatccttgatgaggctacgtcagctctggacccagagagtgagagacttgtgcaagatgccgtggaccgcgctaagcagggccgtacggttattctggtggcacacagactatcgactatcaagagcgctgaccgcatagccgtgatctcggatggccgtgtggtggagcagggaacctttaacgagcttgccgctcgtgaggacagtacttttaagcaggttgtcctgaacgggcagaactaactccgattcacttccatcggcttgagttcacaagcagtgtgggcgggtgagcgttgttgatacatagaaaacaattcatgaataacagatgtgcgggtgacggtgtattcatgcggagtgtggtagttattcattgaatgctggtttgctggatgaaacaagcgaaggcgaagaggtgagtttgcagctacgaaaggagaatcatggagagacttacactgatttcaagtattccttggtgaaaaggtccagcgacagggatccacttcgaactgctgacactgcagcggccccactccccacaggcgtcgtcgctcgatttccctcttcgattacgtcgctctgtccagactcagactgtccttctggattcgacctcttgccgctgctggtggcttcgaaactcgcaaatgaacttgatgtatcgggaagactcgctgaagcctgcagtaccgggaatggaatttcatctctttgtgcgccacgtccggatggctgcgagctccagctgatttccagcctatccatgttaactgctgaagctttctcagacgggaacaggtgattgtacaggaaggtgagcacctcgtcgtgagctaacaaacgttcgattagtcgtacgcggtcatttggtgtgaagtcatccagctcaacgtcgaatcttggttggcgaggtttgtccccgggtgctggcaagcgtgcaccccgttgtgctgcccccttcctatcaactagggagtttggcccacaatcgcgtcttcgacccacttcctccttcaccgagtcaacacattgcaggaaaaaccgctcaagaagcgattgtccggtacccccatctcgcctcagcaggcgttgctgccttttgatcgttgtgagctcgtttgatttatgctgcagctcccgtttcaaggcgtggatctgctttttgagtttttcctctcgctcttctgccaacatcgccgtctgccccgttgaagcaacgtccagattcaaatggggtaaaccatgagctcctactgttggtgctgcggcggatatcggatcttgcgagcttcgatgcttttgcattttggagcctgacctactctgtgtgtcgaaaggagggaagactccaccagaatccgacccagaattgtttccaggcacggcgagacgaacatcaagttcggcacgaagcagtttattctgctttttgcacgccttgagctgcttctcgagccagttccggtcctcttcgatcgcctccaagttttctttcatgtacttgaggtgttgtcgtgaaggcatccagtcgcagcgcctccttccggtatcagtcgcgctcgtcttcgatcttcttgatcttctcggacttgttctccacagtctcgttccggtgaattttctcacacatttcgtgcagctccttcgggacgttgtacatgtgcgctcgatacgcagccaagaaatctcgctcctgtcgagccagcactgcgctgattttctcggataaagagccaacaacatcgtgaagctgtgcgtgcttctcacgaactaatgccatgctgcgatcatgaagtacaagaaacgatcaaacgtgagactacgacaagttgcaaaaggtaagactgggagtcgtacgctggcgcttcctcgatgacgattgtgttggagttctgcgcattccggttgcctgcaccggactctgagatccgcttgaccgacgtcaagaaggtctccttggagaagacctccacatcttcttggttcatcggactcaaatcacgcagtacagtccaagttctagcgcaggtgaatgcgacagcgagacggggactaacgaagtcttgtctttggataaatgcaaccacggtgtcatcagaacccacggaaatagcgagcactttcgatcaagaaacggttcaacgccccccccccccccaccatgaaagtgcttgtgtatgggggctgacagcctgcatcgcctcgatgccagtgccatactagcgcaagggttccatgcactggtgctataattctgtagtatgcttaaggcaatcggcgtggcaatttacgtgatgtctactgaaggaatagcaagagatgaatcgtccaagaaaccgtcaccagaacgacgcttgagcagaattcaacatacacagcatcaaccaactcggaacgcgagctcgacgcgatgttccagtcacgagcttccctggctccttctatctcctcgttcccaccggctgacatcttctacgactgggacagcgacgaaagcgacagcgatgtggaggagctcttcagcgccgaagacttcgtcacggtatccgaagaccttctgctcgtgaagctacggtgctttcatccgaagctggacgtgacgggactctccgctgccttccatcgagagtttagcgtcacgagagactcgcaagagttggaagcgagactccagaaactgcaggcgcccgagttccgagctttgttcgttttgtacctgaaagctgttagtatcgccaaggaagctcagtacacgaccaacgcaggatcagggattttaccggagtaccagcctctcctcgagagcacgaggacgtcgtgcgagacccaactcttccagatgatgtacgacctcgacaagtaccagcaagaggcgtctgagatgctggcggtggaagtgtccggtcggaacttccccaaatactcgcgctcggtctcgagagcggagctccgtcgttgctgcaaggtgatcgacgacttgttccggcgtcaggtggaaggcgaaacaacggcgtcgcaccaggccttcacgttgtacgcggcgcagacgctgaacgagaagctgataatcacggacacggcacctcgctacgactccatctcggtcttcaaccacttcgagcagccgatctttgatcgtctcattctctacgcgaaggacccgcaacttgttgagcgattggcgcttcaaagacagcagcaagtggaggcgaaccgcatcaagcagcagttctcgcagcaacttcgatcgatcttcgagactttgcgactcaagcaagcggagaggctcgagcagatgcaggtacaagagctcgagaccattcaaaatcaattggagaagacgcttgaggccgatctccagcatattcgtcagatgcatgcagccctactgaaccatgaacgcgcgaagatcaacgctaaatatgaggaacagaagactgtgctgagcgagaaggtgaagatcatgcagcgagaagtgatggcactccagaaaaagtgtgacagcaatggatggcacggacttgagcgcctcatcatgaatacgtccctgcaggtggagcggatcttcggcacgagtgagtatctcctgcgtctgctcattctcgcggaagacttgcatgcagatccgttgagacgtgcactggtgcgctacatcagcgaagagaacaagctcccgcaatttgtacttcgccgcgaactgaccagcaaaatggtagcggagacgacaatactcgcaatgctcaaggaggcgacaaccaaggaccttcgagaggttgccaccttcggagcgagcttcctccaccaggatttggtgacgcgcgaacttcacactcggagaatcgagttcgggaggttcctagcggggctcacaaacgatcgacttcgagctgcacgccggtacgctgttgccaagaaacttaccggtaaggcttccaactacgagactgcgtacacgtccgacaaccaaattggccaggatcaagatgacgattctcagactgtgatcctcgacgctgagtttgatcgctttgctgcggctctggaagattttcaagatattctatcgcaggagttcactcggcgtcgagaatttgcttgcgtgaagatggatagtacggatatcgagcaatacgtgagcttcgcggctgaagactgtgtgttgcaactggaagcctcgcaacgatactgcactgtacacgcgacgaaggagcgacgtcaaggagagtcaggcaagtggatgtttgaggtgaccattgatgtctttggcggagacggtgaaagcctgctgattggatgggaggtacctcgtggctcaaacgcggcagcggcagagcccgacgcaagctccttaccctcttctccaagtagtaaagtgtctaaacaacatgacactgggtctgtggtgccggggatttcgccaagcgatgatggacgcagctacggtgtaacttggcaggctgatggcggtcttgacatgggtatgctacatgctaatggggtttcaaagtcgggagtgccaagttttcgagctggtgacactatcggctgcaccatcgaccaggacttggccgttcctcagttgcgcttctacctcaacggggatgttacactaccgctacgccgaacaactactgcagggggaggagtattgtcggcagcggattcttcaacttcatctgaaatttcgaccagcttcggcatcgcagtcacgaacccagcatacagattggtgcctgtggtttcgatgtactcgtccagcaagaagccacagatgcgggtatcctttaacttccgaggtgactttcggtttcccattccaggatttgatcctttcggtgccccattataagctcatagaccattgggcgccttccaaaacctacataaaacggtttaatcacggtcggtttgatgccccctttaataacagttttataagttttatccgcattaaattttcggtcaaaattccgacgtccaaaacctgcattaaacggttagtctggtcgactcaatgtgtcccgttcattaaaactatatgggagattgtatgacacagaaatgaggcacattagatctggacaaatatcacaaaataatctcgatatctttcgatacgaaaagccgcgaactctcgttcaatcacttccgcacacccggcagaacgtcgacgcctccctgtgcgccggcaccgcgtccacatgactgaccccaggcagctggtggtgttatgcatgatgtcggagacccgtcagcgaatgctggatgctgtcaaagatctgcgacggcgccttggtgaggagaggaaacgcgccgaacacgctcgcatggtccgtatccgacactacgtgaccacttcctgtctaccagctccgcggctagccccctggatgcatatctggtggttcggcagcgataagaatttcataacgatcaccagtgtaacgggattacatagaatagtgaccctatcactattccgggatggctacatcggtcactcccctggatagtgacccaagtggcctacagcagctgcgacaacgaacatgttccgacctggatgattatatcgctcaatttcgacaattgctctcgcagattcgaggtatgggcgacttagatggttcgtacagggcctcgtgcagaagacaagagaagaagtcatttattgccggtgccaaacagtttcggacgctatggctgtcgctcagcagtatgagcgctcgcacccaaacaattatcccgatcgcaacgaaggtaccagccgctgggcacagcgaggacgcccgcaagctcgcttcgcacgtccgagatatccgcagcagaataaccagccagagcccacggaaattggcacagtgcaggtgtcacgcgaggagtgtcgtcgcaaacgtctctgcttctattgtaaacaagcagggcacatgctcaatcgctgcccaaaacgcggcaacgcgtcggctaacaggcgcgtatacgtctcgcagatgacttcaagcccttccagtcacgtgtcgcctgctgaagccgctgacagcattcatgcgaccagagtgattcacttcaacatggctcgcatcggcgcaaatgaccctggcaagtcgcgccaaggggagctgcttcgaaagaatgtggttatcaacggcaagttggctcgtgccctgattgacagcggcgctgacaccaatttgattcgaccaggttacctgactggacaactgatagagcgcaaggtcaacattgaaggctttgatggtgcccgcctagagaatgtcgtagtgaaagaaggggtgggcgaggttacgctggaccagcagcgatttcttgacgtcatcctcaccgagtttgatctgcttgccagtcacgacgttatcctcggaaacccgtggttgactcaattcaatcctcggatcgactgggctacgcacgagattacggtggacgttccgttgatcacacccacgttttccttttccgtgttgaatctgtcggccgcgtacaaggaggtccctctcgaagtcgatgagtgcaggcctccacagaaaatggggatgccagacctccctctgtggtcaccgtttgggttcgaagcaattccagacttgcagcgtgcattctacgtcaaggtgaaaccattgcagctgaagtcgacgtggcctcgatatgtggagtcaattcccaatgagttccacgacgttgtaccagagacgctacccgctgggctccctccacaacgtgccgtggagtttgagatcgcgctgaagcctggagcgatgccgcagaaccgcgctctatttcgtcaatcaaaaacggagcaggaggccctcgacatcttcgtcgctgatatgctggagaaagagtggattgagctatctaactctccgtgggtgtcaaatgtgttcggagtgccgaagaaaaaccccgcgactggaagagctccaacgaagtcggaatggataaaagcattagctggtgatcccacacagccaattcgctgggtggtggactacagatttctcaacagccagacacttgtgcctaaaatcccgataccgcacatcgatgagctgttcgaccgaatgagtggtgcagtcttcttctctacgctcgatctcgcacaaggataccaccaaatgagagtgaagccagccagcagaccctacacagcgtttcgtacacgcaacgagacctaccaatggtgcgtggctccgatggggtgtagcggaatgcctgggatctggtctcgcttgatgcgctcgctgttcgacagattcgacttcgtcgtagtatacctcgacgatatttgcgtgttctcacacaccgcgggcgagcacgagcaacatttgcgccaagtatttgaggtaccccaggagcagcagctctacgtgcgccttgcgaaatgcgagttcggccaagtgaccatcgacttcttgggtcacacaatctcggctaaaggtctcgatgtcgactcgaagaagacggaggcaattcaacagtggtccgcgccgcagaacgtgaaggaactacaaagttttctcggtctggtcggatactatcgccgctttgttcgagatttcgccaagcttgccatgcctctcagcaacttggtgaaaaaggactctggtgggtactggaacgaggaacaagacgctgcctttacagcaattaaggccgcattgcaggttgcccccgttttgcgccttcccgacttctccatgtcgttctgcatcacgacagatacctcgggctattgctgtggtggagttctctcacaggttgtgaatggagacgaccaccccgtggcgttttactcgaagaaactctgcaagggtgaactcaactggccaccgcatgagaaagagccgtttgcaatcttgcttgccctgaaaaagtggcgtcactacgtgtatggcgcacgctttaccgtatttaccgacaattcaccttgtcgatggtttctctcccaccctcgcgtctctgggcgtttggcgcggtgactagactacttcagtcagtttgacttcgagctgaaacacgttcgaggtgaacagaacgttgtggccgacgcacgttctcgtcgtcgtacagatgcagctacctccgacatgaaggtgaacgtggtgatatttactccgtgcgagtcgacgagcgcacaatcggacccagagctgtcgtcttcttcgttgggaggggaggtgattccatctcctgtcgctgttcatgcagttaccttcgataccagtacagttaccctcagccaagacactaagcaagaatttgctgaggccaacaccaaggatgcgctgtatgcttcagtgcaagaaggtcaaaccgctgagctggagtttggaactatcgaaaagctggatggactagtgcttttggtggataagcagtctcggcgtcgtctttgtgtccctgctgatgacatgctgcggacgaaaatcctcgtggagggtcacgacggacctggtgcagcgcatccagggcaggaccggacactttctcgagtttcgcaatggtacttctggccccagcttcgtcgcgatgtcaaggactatgtctcaagttgcctcacgtgtctgcggtacaagacaagcagcaagaaacgcaatgggcgcatgattcctctcgacgtgccaagtgagtcttgggaagtccttgggctcgactacgtgaccggattgccagaatccgaaggctttgactgcatccagactgctatttgcctactctcgaagcgacctaagtacgcacccactgtgattacagccgacggaacgcaggctgctcgcgtctttttcgactcggtggtgcgccaccatggcctcccacgcgccatagtaagtgatcgtgacccgaaaatcacaggcgagttttggcaggaattgatgcggttgctcggggtccagctgcggatgacggtcgctcacagggcccaagcggatgggcaaaccgagcggtagaaccgcgtactagctgattcacttcggtgcatgacggcttaccacgcaaagactgggtaaaacacctcggaaccattgaactggcgcactcgacaccgaaaaagaaggctacagggttctctccgttcgagatcgacacagggcgtcgcattcggcatccggctgaattgtttcgtgtcaatccgaccgaactggcgaaatccccagctgaattcgcggtgcaatttattgacgagcgcaggaaatttgtcgatgcagcccgacagcagctcctggaatcacagggacgcgcaaaggacaactatgaccgcagccgcagcaacgatcagttcaaaaatggtgattcggcacgtcacactcgccaaaacatcggagaagcagaagctggcaccccgcaagatcggcccgttcaagattctcgaaatgatcaacgaaaatgcagctctactagatctaccggcgtcaatgaagcgcctccacccgtgttcaacgtggaattgctggagcactaccccgcaccggtcgcacattttgatcgccgccctgctgcgaagaacttcccggtggctctcgacgaagaggagtatcacgtggtcgaagcactcctcaagaaacgtcaattcaaccgtcaacgggagcggctaatcaagtggcaaggtttgcctgaggacgaaaacacctggcttcgtgaacgtgacgtgaagcacgttgtccattggcgacaactacttgctgactcaaagatagacagcgtgttcgtcagctttagcgggggagaatgttgcattttctcatcggtccggaggtcgaagatttactcgactcaaattatggcttcaagatgagttgctcctggaccggactgagcagattcaagtaggtaacagtctatttgtatgagtaactagattcctacatgtcctggtagtgctgaaggttttctcgcttccttagcagactccaaacaaaaatgaatcattctcacatttcctctcaagtcatcaagtctccaatcgcatccaactccgtctacttcctctacaagcctctctacctccgcctcgcctcgacctccacgcttctccaagtttgcacccggctggccgagccccgaggagtgcaacacaaacctccacagccatcatgaccatacccggcagtccgatatgtaggaacagcgggacgtagctcttggcagccttgagattccatccgtggccccaccactgtcaaaggtgatggggtcgccacatgaagtacggtaccaggagcagtgagagcgtcatgttacccagtgagcgtccgactgcgatgccgttgaagcccagcgacgtgtggtacgccaggccgtagccagcagcgaggctgacgaggttcccgatcactgcgatggcgacgagaggcttgacgatgttttgcgcttgcatcaccttgcgcacgagttcgtagagaaagaggaacggcagtccgggcaacatcaagcgggagaagtcccgcgtcaagtaggtgacgtcggcattctggccaagccaaccgagcttcggctcggcgaacgagttgaccacgagcatgggaacgagcgccacagtgagaaccaacacaccagtctggaagtagaccccgatcttgccaagtcgtttggctccgtacgcttgggagcaaagcgtgtcgagggccgacgcaagacccagaccaagcgactgcgccgtgacgttcagcagctacaaccaaagacaacgcgttagatcaacttaaaaggctcagggatgtagcaatcggcaagtgtacttaccatgacggagattgtggcggcgtccacgtagtgctgcgagttggggccttccatgttgccggccattaggacggagacgaagcccgggaggtctgaatgcattggtcatatatgcatgtctatagtcaacagagaagtgcacttgcaatcacttaccactgggaggacttcctccatggggcgtggggtgcggcttacttgctatacaaaaacggatggaaaaaattaaataggttaggtgagatgcaatccgctactattcgcggtttatgtgcgattaagaaacaggatggaaatatatggagccatgtaaagtgcttccctaagtgtactgggggttgcaccccagacccccgcatcaagaaaactaactccgagtatgcggcaacgggtccgttcgctggaatgctcgtcgctgggcccgcctccgcaaatacggcgcgggtttgctgcggctgcgctcctcactaccgtttctaagcaccatgtactcgtttctatttatagtatccgattttagcggagtagcggattccatcctttttagtagcggaaataagcttaatcctgaggcgtgggtccggctcaacgtgttgctccgcatcgccttggacagccacaaaatagtcttttgtgtcttttgaaaagactcgttgagcgagttattgacgatgagctgctcgtccatcgtaggcgcttgcgtgctagaaggcggataggattgtgggcggtctggtctacctatcggtatgtagtcttgcgaaaggcgcacgatctcacaaaagctactgatcgcgccagtggtatgcagacgtaagtcgcaagatgacgtcgtcttcccactgacgtgaacatcgcgaatactaaacaaccaaccagcactcgtcacgggtaaatctcaggcgatccgcaccacacgtttaacctgatcataggcaacaacataaaatatttgtcgttaagtgtccgcaccacacgtttaacctgatcataggcaacaacataaaatatttgtcgttaagtgttggtcctgcggttgatattaatacacatagtatatccccgatgtgatacatgtagactctatcacatacaattattctgtcgtcaagtcagtacgcagacgcaatgccattgcagatctccaaaacgccagataatcgaattagcactggtgcgactaactataaactcgtatacggctgccatgcgtcgtcgtagcatgccttgcatttgcatgaagtaccagtagagggttgccgctggtccacctcctcgacagcatcgtgctctcaatcggagtagctgtaggcctcttccaaggcgatgttcgctcggtacgtcgagcggtggcatgcgaactggcagttaagacgacaggaagtggcccgagcggaggaggatcacgatcctcgttggacaacattggaggagcaagggcaagctcatgtgtgacccaccacgctagagcgagaacatcagtagagacggttttgatcagatacttacttaggatgcatgttgtatgaaatttggacggagacgaagacgtagggacgattgccgtagccgccgggtaagtgagcggactggtcagcggagttcgatgcagtgctcgcccggagcgatatcagcggtaaccgcaaacataaaaataaaaattctaaagtgatgttcgctagccaccaagctggagccccgcacgtcgcctcgtctcgtcacgaagccccaggatgacaccactccccgtcggtaccaactcctgtctcgctatgacagtgacggaccacaaataccagtcttgcaccagcagataccacctcagcaccagcagcgaaaaagacgcaggcagcagcgaaaagacgcaggcagcagcgacgacaagcctcagcgctttaacaacttcgatatcacacagcgattcgaccgcgagttcgatctccaaccagagcgcgtggtcatagtaccactgatttgtcccgacacccccacattcgctgagtttaccaaagcatcctcctccaggatgaccttgtgtgcaaccttcacgacgcgctcgaaggccatgctagagtattgtcgccagcagacgtggccacgccactgacgagtcggtagctgcggcgtcgttaatccgtaaaagaccttgctgtctcagcattgctttcttgccaagactcctcttcacctccatagtcacaaaacaagcctccttgtacacagtccaaggtagattccattcaattacgccgaccgaggtaactacacgaccaaggtatttacgttggccaaggtaactgtatgctggtcgagctaaatacggcaactgaggtaactacgccaactgaggtatttatgctgaccgaggtaattatgctggtcgaggtaggaactgaccgtgactcaagtcagaaatccacgtatcacgacactggaagcccctagcttgaggcatgcacttgtgagcaacgtactgtagtattttttttgaaaagacaacaatacttggtgcgatgaaatcggtttatgcgttactgtacaagagggatatctttggctcactaatgagcttccggatggtatcgccacatgcagcgacgtaatactttaaagcatgggtttcttgcatgacctaacatgacctgacctgtcaatgacctgtttcgcgctcttccagccccggggtctggtgggcgggttgcaagaaaatgttctgcggggtgcgtatgtacgcacctgggggtcgcaatgacgtctaacactaggggcaaataatattatattataatatcctccaaagccctcgtagctacatgcctgagtgagcgcggcgagctttttaatgagcccacacgaggcattcatccctttattgatttgcacttggctcccatccgtttttgtatcatacacggtcgtcatcccttttacactagattttaatcttttttcatgcagtgctcccttgacccgctgcttgggggggatagcgcgtatatagccggtttttggatgactgtgccgcgcatatcgaccatggtgccgatgctgagcgctgtaaaaaggtgattcagcgtgttgagctggtatggctacgacgcgctgagcctggcattgggcggagggtgatcgtattcgcctgcacacagtgtatgtacaaagattttgccctggcgtaggctcttagcctgtacgactgcctcacagttgttgttagcagcaacacgctagcttgcgctcaagtatcgtgcatcgtacggcgacttcatggcggcagtgttgttgatggttgttgctcaaaagtcgcgcttgacagcgtgccacttctgtgacgtgctgacgtaccggattgctttaacttgacccctgagcgagcccgtgttgtctgctcgcctgagtgctgcgacccacgtagcatgtgcattacttaaatacttgtggtggcgttagtgctgttgaccgattcattgagcctgtactcaaacggtatacagagcgaacacgccgtgtgtaccgtgttggtgcagttgcaggtgttcgcagctgatcgtagggctgactaaagtacaaccgtgtcgatgcggttattgcagacaaatcggctgagcctgtactcaagcgttgtactgggcttaccatgatgattctgggtgctgatagccgttaacgaacgcgttgctgagtctctacatgagcgacgcgatgcagggcatacaccgtgttgatggtgctgttgctcgactatgacagagctgtgtacgtatcgtactcgtcttagagccaacctgcaagtgtagtgtagttacttgtacagtagaggtaacctgacccattgcccccccctttcggaacggtgagattgtttttcaatcccgccctaaccccgggcgcagctgcccacagtccacttcgcagttctcaaactcgaactcgcagttgttccggttcgtgacgccattacttgcgcagataagcgggaagctcggagggagggggcagtcaaaatgggcacagccgttggagccctcttgggcggagatgccgacgatcagctgtgaggcgagtgcagcgacgacagcgaacttcatggtgctttgcgacgggtgcttgactggagcttcgaattggaaagtgattcagcacctgccacaccagagcgcaacaagttcaagactcaagaagtacactgtaccaggtgtaccctgcaccatcaatgacgaccgagcatgcctcgcgcgtggtggtgaccaacagcaaaagcaggaaaaagaattgtatttaccacatgaattcaactgggtgtgcacacgaacacgtagccagcagcgagattgacgaggttcccgatcactgcgatggcgacgagaggcttgacgatgttctgcgcttgcatcaccttgcgcacgagttcgtagaggaagaggaacggcagtccggtcaacatcaagcgggagaagtcccgcgtcaagtaggtgacgtcggcattctggccaagccaaccgagaatcggctcggcgaacgagttgaccacgagcatggggacgagcgctatagcgagaaccaacacaccagtctggaagtagaccccgatcttgtcgagtctcttggctccgtacgcttgggagcacagcgtatcaagggccgacgcaagacccagaccaagcgactgcgccgtgacgttcagtagctacaaccaaagacaacgcgttagctcaagtcaaggctcaggtgtatcaaaacggtaaggtttacttaccatgacggagattgtagcggcgtccacgtagtgctgcgagttgggaccttccatgttgctggccaaaaggacggagacgaagcccgggaggaactcgaggacggtggttcctgtctggaatgatggcgttagatgcgtagtccatggataacttcccttgccgtcacgtaccactgggaggatcagcttcagtaactcgcggacttcctccatggggcgggggtccggctcaacgtgttgctccgcatcgccttgaagcccctcgacggtcacgaaagactcgttaaacgagtttttgacaatcagctgctcgtccatcgtagtgagtgccagtgcttgcgcggtcggagtcgaataggattgtgggcgatctctcgttgtctggtgaaaggcgcacgatctcacaaaagctgctgatcgcgtcagtggtatgcagacgtaagtcgcacgatgacgtcgccttcccactgacgtgaacatcgcgaagactaaacaaccaaccagcactcgccacgggcaaatctcaggcgattgtccaaaattcgaactgaaaaaagaggaaaacgagggattatcacgttaaacaaaaaaaaaatgaaaagttgcaccattctccgtctgcatcgaactggtgcgatacttggaatcactcagtgctggtcgtggcggcggccgcttcgcagctcttgcagttcgtcggaatatccatacctttcatcgagtaccagtacggcgaatactcgaatttcctcttgcacgtgctgcacttgcgtcgcacggttttcttcgacttggaaacgcacgatttacagtacacctcgcgtccacctcggtacgctgcaatgaactcgctgtgcagcacattagtaatctccccacacagtggacaactgcacgtcatcgacttgttcgccaccctctccttcggctcctcggttgttgcatccgactccgttttcttcactgggttcaacttaagagccctgcagacggagttgcactcgtgggtggcaaagaacgcggtcatcccagcgtccgacaagttcccgcagccgaatttgtccctatttttcgaatggatctgcgggtccgtgaagatgcacccgacgccctgaagatccaccaccatgagctttccgtacgtcttttgccacgtgaagtggctgaaagcttgcgctgtctcactcagattcaggccgtcgtcgctagtccagccattgttgttgttgtacttcttgtactcaccgccgatgtacggctcagcagtgaacatggacatcgacgagctcaaccccgctgcggtagggttcttgatctcgtaccaacaagtcgagatgaagtccacaccgttctcaatctcttcggacagcgaaaactcggtcgcgagtcgcttggccacaatctgcatcttgacgtcattctgcagtgaatgcttcgactttgccatctttagggcagcttttccaaagtaaattttagcaacgaggcgcttctccatcttgcagtcatacatggcatgcgcagacctcatcgcccccttggcgaagcaggttcgagccaaacggatgctcgtttgttgctgcgtgtgctttagatttaagttcttccagtcaacgtgctcacctgggctgaagtgcagtgaatggcggacagcaccgaggtccgaccacatatacatgttgttccagtccagcgagctcatcattggtggggcatcctcctcgtcctcctcatcttcttcatcttcttcaccttcctggacatgcgataagcgggtcgtagctctacagtcacgtccggaaacttccattgagctggcgacgacgcttcgaatcttgctcgccgagatcgaggagctagcggacgagctgatcacactcccgaagcgtgctacatcctccgctctatccaatgaaacgctttggaactcgcccttaaagccatcacggccattcactctattgaaagctttccgaagaattggcaccatcttggctgtgtagggtggacagacttcgattatcgtgaagtcgatgccgcgctgaaccatttccctcatttgagcgcaaatgtcggggctttgctcgatctcagcgcgatacgtcagattgtcttccacgtcgtgaaatttgctcccgtggcacggcgcgtcggccacaagcacaatgcgcttagctttcgcctcgaagggcatctccaatgctgccgcaagtccgcctggaatatcctccgctctgtctccaccaccatacgcttcgagtgaggcgataaagtcgtatactgccatcacgtcaaaagtcaacgcttgagtctgcagccgctcggccccgtcacaaaagtcgcggtaggccacgaagccaatccgaatctttgctctgggatggtcaagctgaatattgttgatgatcgagatgattgcagacttcgcttgtccaatccactccctcatcgaccccgtgcagtccatgactatcacaaggtctagtgcgttcaaactctcgcatttgcgtcggacttccttctcgactttcgtgatcctgcgctccatctcgcctcggatctcgctaaatcgcttcatctgctccatctcgtgctccatggccgtcagtcttctcttaagctgctcgatatcagcgttaaccgagtcgcacttgccctcgtgcgtgcaccagccaatcttacagctgaactttaggaacctcttcttgtgctgtccactcaattgctcgcgcagcttcgccaactctgcctccgcagcgtcagcgcgaatggagctggccgacttgggcctggcggtgctctccgttgctcgtgtggcagacgcattcatgatcttaatcgcctgcagcttctcgcgtagcatggctagctccgcctcagccgcatccgctcgtagcgaactcttcgatcgtctacgagagaaaaacatcctcgaccctccaattgacttgaccacggaggcgaaagttggagactgaattggcaagactcaatcttcccgtggtcatgttccctcacgggggctttccaagagatttccaggcatttctctcactctcttccagttgataacctcagcaacacgtcatcgtatgtgacgtgagacagacttttgtcgggagctatttcaagtgtagccatcacagctccaagtttgactcgcattattcactcacctcactgcctatggcttctgatggccctgaggtggccttgccgcctttcgagcgcatcttgctgctgctcgggctagagaagttgccgatggcggaggagctgcgcctgatggtcggcggtcgcttccgcgtgccgcaacaagtccagctcaccgacatcctgagcgcgatgcagtccacagtcgcgctcgccaacgtcgcgtcgtggttctcgcaccagttcgacccgaccgacgacgtggagcattacctgcaggacgtcatccgcatgcaccactacgtcacctcccacgaccgacagcggcaactacgcagcaaccacctcggctgtctcgagtctccaaggcgaaacgatagtggggttattagcgccaataccagcacagtcaccaagcagctcatgcacttttacgcctccttcgcagacagccgagaccgccacctcctcacgaagatctaccagacgctggggctctcgcgcgcgatcacctactgcgtcgtggccaagacgctgtcattcaagttccagaaagagtttctcgacctgttcgcggaggatctacccgaactgcgagactggatcaattggctggatgaactggatcatgccgtgcttgctacgagtcgaggaagcgacgaagatgaagtggacggtgaggtaatttacggtcctggctacgaaagtgccgtaagtttcgttagtagagccatccgtgagcactgtatgttgacgtggttgaatctgttgcggcctctggacaccgccaagcgacttgcgcttatcgatgcggtccacaagctcctggccgcgtcgaacaacagcggcttcttgtccacaaccaccagtacgttgaagaagctgggcagattttacgagaccaccggcatttcagccgccaagctgctggatctggatgtggcggtgcgacgcgagttgtcattgctgctggaagagttccccaccatcatcttgatcacgctcttcgccaagttcaacagcgagaggatgatccatttggtcgtcaagcgcggcctgccattcttcccgaagaacgacttgctgaggatgctggaggcgttggctccagctgagccgaacgctatcgaggtgttcgtggccacggtcttcagcttcggccgcaagaaggtggacttcttgctcctgttcctcaccttctccaaccagagccagctgcggttcttggacctcatggtcgctacgtccaactcgcctttgaatgccgacccagaggaggaagaagacccgtacgacgcctttgcgagtcaatcgcacctgcgcgggaactatttcttgctcaagctcttcctgtacgctcgcctgaactcggcggaccttgtgatccagaagctgtccacactaccgagcgacatggctcagcagttgatgtacggagtggaggttcgcacagcagacgacttggtggtgctcggtcgggggcttgaactcattcagctgcagtgtcttcaaccttttctgcgcttatttcttgcgattcacctcgagtggcgtgagacgctcgtgaagttggtggaagatatgccaggcgaggaaacgctgccgctttacgacacgctgctcagtctccatgccaccaataacactgagtttggtgatgataaggtgacgacagtccttcaaatgctcaccaaccttgaacggaaggacaagacacttctctgtcgagatatcctcgtgaatcacccagatacccaagctgacggggctgggacagcctccccgtcctcgaccgaaatccacgccaaagtcctgttatacctctgcgagtgcgaactcgcgcggcacaaggtgctgcgtcttctccgcgtcattccgttcgtggagtacgatcgcctgctcttcttcctgcgcacgcagcggatgcctgagcaagtggctttgactcgcctcatgctgagcatgccctgcgacgccaactgccggctcttagcgaagatgtcggcgtggtccactgaagccctcgacgccttcttccagctgctactgatgctcgccaaggtcgagtacaaaatgttcgcaaagttgatgggctcgcagtacgtcagcgccgagcaattggaggtgtttatcacagtggcggtggacatgatgaaccaggcttctagtcgagagctcgtcatcttcgctgctgaactgcccgtccacatccggaatctgctcttcgagatgctcgtggatcgaccggagaagggggttctgctgcgcatcatcagctactcgactcggattcctcccgagttgatgcacgtcctggtcgcgctgctccaccgcatgtcgtgggatatccgttcgtctttcgtcgagcagcttcgtgccttggacggaccgaacgacgtacagaacctcgcagacgtagcgtccaacctcgaagacaacgagtcgctccggctgctggttttgctcttcaacccgctgcaaaccaccatccgagtgagcctcgtagccattttcctgaaacttacggtccgcgagcgagcattggcgctctccagcctggtcaagatgcccaagagctcggtgagcgtattctgtacagccatgtgtagcccgagctgtgaaccggtaagcccctcattctgccgcgttattgggctggttgacgaggggtaccatgcaccactgctccgcttactgaagagcgagccgcagtggttcttcctgcgtctgatggccgagtactgcgacgttggtgagaagagtcaagccgaagttacggagctgctggatcgggtggcgagggtcgtctgtatgttcacagtcgacgagcatttcttggtcttgcgagacgtgatccgggaggctttggcggacgcgttggctctgaacgatatagtggctgtgctgtcgttgttccctgaggtgacgaagctgctcgacttcctccgctacgtcagcgggtttgccaagtacgcgcgctcgagcctgctcttccgcgtgctctcgaagtacgagcagcccgcgttcatcttcgaaatgtgccgcatattggacgtggacgacgccgtcttcgcactgaaaagactagatcgaatgtggcagcgaagacaccaagagctggacaaggcgatggagcccctcgccactttgtacgtccatattgtctgcgtagtttaatggtacaaacatttaccaaatgatgttacgacaggttcgccgggagtaatgcacaagtgaaagacgacttctgtgacctcatcgtaggcttcagagggctctcagcagctctggacgaggcaaaagcgaacgggtccgtcgaccgcgtggtcacgccacgagtgactgagagcgtccccgacaatgaggctgcaagcgacacggacgacgacgacaaccctgacagtcccctccgacttccaagcgcgacacccctgtcacaccaacccgttccgctctctcgacatctgcaacgaaccaggccggaccaagccttccctcgcaagcgaaccgagcggaaggcctggtggcaggacctcgatgacacctccttcctcttcttttcgacggccgagaaccagcaatcaccaacacaacaagctcaagactctccagtaaagtcgccgaaaaacctccctcctgtgttcatccgcactgagcaaccccacacgaccagaagcagcgaagacactgacaacccctccgtcgaaagtcttccccagatcgagacaccggcaccaccgattccacgaaccacgaccaagcagcaagtaccaactcgacgtgcaactacaaactgcgagccacgcgcttgcaatgcgcccctcagtcggtccgagtcagcaccagcaacattaaccttcgagaacgagagtccgtggagcaagcaaaagcgatcgcgcggtgtggctgcagcgctcgacagtccgcttgagttccacgtcgggcgggataaaggcgccgacttcctccagaaacagcgcgagcgcgtctatcaggagaagggagcgtcacgtattcggcacgccaggaccccagcggcactagcgcatgtcatggaggcccgcgtgaaccgagcgctgggcatgcgtcagctgactctgcacactgcgttgtcgccgctctcccgccctgacccgcacacggtagaaaacgcagtagtgatgctagcaaaggcagcacagcttcgggaatccacgccgcaaggctttattacggagcctcccacgcgaggcattccgccagtgaggcatcacacacgcacgctaccaaccagtccgccaactccagcaactagtttgtctccgcacctgaaactcgacaaagacgtcagctgcgagcctcttgctccgtggtgatgcgggtatcgatgttcgaccacgtgtagtggagcgccaggcggagctgcgtgatccgagtcccctcccgcgtgttcctgctggacgatacaatggcgtggaactggcaaatgtcgtgcagcagcatcctgaagaagctgtcgcgcatggccaacgtcagtgtactcgttgagacctcccacttgcggaattgggactcgtccacacacggctccaagtcctgttggaacacggcgatctgcgcgcgacacgcctccgtcttgcgctgagcgaagagaaccacaatctcctcgagacagaagaggaagcgacggtgaaggaagcgctcaaggtttcgcgtaatgcagccagcagtgacggcgaatccctcggcggcctttttcttcttgggcttcctcttgcgctgggtctgcgaccccggcgtggcttcactccgcttgcgttgcgcttcttgctccctgttgagggtctcaaacagatcctccagcgtgttggagtcacagtggcgcagtaaaatagtcgacttgagcttcctctcgcgctcccgcgctgcttctgacacaggtctctctccgcgcgcgtgcaggtcgtcgcacgttttgctgttcatgaagacccgcgcctcccccaccgcccgcatcagagctacgagcggctccctctccggaatcttggacgcgcgcgacgcggaagtactgaactcgctttgactagcgaatgccgcgtcgtacagcgcagcgcaaatcgcgttcaccagcaagttgctgcggcggttggccgcggtcgacgtggtcgcaaccgcgctgtggaagcccacgaatgcgcgcaaagtgttcgcgcgtccgtgctcctgttgtatccgtcgagccgccacttcctcctctcctcccgctgcgtcctcttcagaatccatcgcctgcgcaatgcccagcgcagcagcacatgccgccaggttcgcaacggagagcacaagctgcctttgccgcgtgagtctcgcgggcgtgaccatctccgaccgcttaattttctgctgagctccgagcgtcacatgcggcagcgcgagcgacaagctcatgcgctccgagagcaccgccatgccgtagatcttgaatacctcaaagatctcgctcgaagttcgcagtatatgttgctcgtccagctgcagcatggccagccgcacgcgctgcgccgccgtcaactccgtctctcccccatccaccaatacgtccacccgatcactggtcgtcaccgtctcagcagctgcaaaatagtggtgcactccgtcacctctcgagcttcctgctcctttgtactcctcaatgaggtctgtgtacgcgcgctgctcctggtcctgatcctgctcttgctccgcgaagacctcgtgctcgaagacgccgtcgcgcacctgcagctcgcccgtggcctcgtccagctgctcctgcggcagacacgcgaacgggttgaaggcgacggtgagcgggcctttggccgccagcatcgtctcccccttctcctccgcagctttagtccgctcggcgaagtgcaggtgcaacatggtggccagcagcgcatccaagtgcgcccggtaattggtggggtctgagatcaactgcaacttggacggggtctgctgctggtgcaacttaagcaccagctcgcccacgacggcctccaccacgtccgcgcgctgcttctgcttgagtctggcactattactgccgtccgcctctgtccgccgcacggtggcgtagcccatggcgtcgtacacttgcgctaagttgcggttagtcaccaccgccagccttaagttgcggaacacgcgcgcgctcagcggcgcgtggtggaactgtgacagcaggcagcggcccacgagctccccgaccacggcgtcgcccagccactcgaacacgtcggccagcgccgcggcgcccgcgcggctctgcagcgcctggaagtgggccaccgcctcggccgacgaccccgcgctggatgcctcctcgcggcgcgtcttggcgcgcttcacgcgcgcctccacgtcgccctcggagaaggaccggcgccggtgcgagtgtccagcagctcctcctcggcgcttccgggtcatgagtgtgaatggcaagtgcccattttatgggaccaagtacgagaataggcatgctacggctttttacttaaaaatcaaagttaccataattattttgttatacaatgattgtgccctcgacagctacttctggggttattaggcgtacaaagttatctgggattccagcaggctcttggtacatcagcgtattcccatcacacgtgaaaataatcgaaccttcaaaacatacacatggatttcatccgtacacatgaaaacagccaacatctcacacacgtgaaaaaaaaaacacccgttgtaaactggtgggggaattgtgcatatcgtaaactcaagctacaatctatctcgcttcgcttgtcctgcctgtgtctgagtggcgagcttatactgggattggaagcaacgttagtgctgctatcgcagaccaaataggattatatccgtggttcatcaagtcaaacgatgaaccctcctgacatctactggtatatattcttgaaaccggtacgactcctgtggcgtttatatgtgtgggcagatcgcaccggtaggatacttatcacactggtatgaccccggtgccgcactgggtccgtttatatgcgtaaacagatcgaaccggtgtgctaccgacaacactggcatgaagcagtagaggaacaaaatgaagtgaaaagaccaattgaagcagactgtgcaatagcactagtttgtatttcttacaagctccacatagatctcaaccaaagctcgaatttttaagtttgtaaaatagagagttttcgcagtttgcatttcccattcccacagagctctgtgggaatggtgaagaaaactctagtcaacgcatttcgctcgaagtcttttcccacaagcattgccccctcaagaatgatatgtccatcggatggctgttgcggcactcacgatattgcctcgcaatggagactgttgtgctagctgctgcaagcagctctgtcgacgtcggccctgctctgctgctgctgttagcgaacaacaagcaccgtgagcgccccgagcgccccatcatcccctcaatccgcttcgtgttgagcagcaagtctgatgtcaactgcgtcaaggactttaggttcgagagagcggctatctaccagctcgtggagctatttgcgctacctgagtatgtcatcaccgctcatcgcgacaggctgcaccgcacagaggcactatgcatactcctctatcgcacaagctacccacgacggaactacgcgcttgagccgtcttgccgctcagcttgtcatgagagaagcttgcatcacttaccagctgagcggcaagagcgtcccatgcggtgtaatgggcctactttggctcactactttagcttacacgtgtgcgcgtgtatgtgaggaagcgtagcttagtttaaattagagttaattatactcgggcctccgagtatagattaatctaaataaacgatccaaataatgtttttgggttaaaatgagaactgctatttttgttttatgtttctgacttcctctaaatgtaatattctaagataggaatctgccaaaggctggttggaagaattccaatgctatgcatgtcgctcattggctaagagatgctgctctcagccaataggaatcctaagtctctatggaccacccgtcgtggtggtcgtaaatgtatgtagcctttggtgtgtctacaccaaggtcgagaaagtctttcgaacctctaacagacgtcgtatctgttagagttacaagtgactgtagccacttgtgcgtgtaaccctgttacaccatccccccctcaaggttagacgcgccgagtcacggcacgtcaatcaggaaattgaccattcgtcaattcttcacgttgggagaaataaaactcgagcttattccgcaatgagctcgccgcagaagaagaccgccgccgcaacagagggtaacctctctgttgctcagtaccatgagcaccagcaggcaaagcgcgacgcgctcgctgcaaaggccgcgtcggggacaactcagtcggagattgtcctcgaaggttcctctgtagtcaacgacgccgttgactatgggagtgacgacgtagagatggaagagggcgaggcctcttccaacaaacgcaaggagtctatcgacagtgatagtctcgacccgcatgccgggccgagacgactcggacgcttcgagctcgaagcgttcgcgcggcgagagcgaaactccgctctccgctgctggggctttaagctccccgcgtgaggtggcgtcttcaagttctccgcgcgctgctcaggcagcgcgcgatccgtggatgccgtctgcgtcagagatcgcagaccatgtgggcaacaccgtgcctccaaatgaaattccgctgtacgtatgcagcgggatccacgatgatgctgtggcggaggagcagcactttgacccgttaacgaatcaaagggccgattactatatcgggctctttcacgagctccgatacttctccagcaagaagacctcttctcgcagcaaagtgcctgagtggcaggcactttgtcaaagttggaatgcttttgttgagaacttcaacaagaagacggctgcttaccgtgagcgggttaagcatgcccgtgagcgcttcgagacattctcgacgcgcgggaggctggagcagctccacagatcctctgtggacgctggtattccatgcgctgtacccgaaggccatcagtgcacgttgtgtcttccgggtgcggcgcgcttgagcgaccgcgacctaaacgggtacacgacgattcgtgtacctgcgagtctcaaggatctccgtgccaagttcttggcacgtgaggaacgcgacggtcgtggggcctcgggcgctgtaggtgaccacagcgctcgcactaccttcgcgtcggcagtgcgtggtgagcttcgtactccctcaccatttccggaacgtcctgcagcaggacgtcccgtggctcccatgtatcttggtggggcggaaaccctctccaacgaatacgataacgaaccggctgccggttcattttcgggatactattgttcacaatacgctcaacaatccagcgtgttgagccgcgggcgtcgcggatcggaggcggcggtggtgggaacacgccccgggtatggtcaacctggtgttgaccttggcccgacgctcgaggagcgggtcgctgctgtggagcagcttcgccgctctgaagcaggagatggcgaccctgagagctcaagttgctcaggcctcgcagaccgcgtcggacatctctgccgacgtgggaggtcgcgtcgcacgcttggcccagcgcgtgaacgcgctggagcagaggttcgctcccgctggggcttccgcttcgggccagccgagctaggtggctcgtgctgccagtatagcttcagccgcccgacgtaaaaggtcggatggaggcgcatgctagatggaatatctagcgtgtaggcgttgtcatgccgtgccgacaccgtggacggcccgatgaagcgcggagcgagcttgctcgccccgaagtcggaaactgcatgtttaggcaggttttgagttgctaacaaaaccaatgaacccttcttgaattcattagtgttgcccctaccaacattgtctgcgttcagcttctgtcggtcgacagaagctgcgatagcgtcttggacaaaccgaatgacggcttgtctgcgctgaactcgttcagctcgtttctagcagtaggcccggcctctgcgttcgtcttcgcggtgtctgtgccctgcacagacccgttcttcttctttttgctcttgtcggcgtctgtgccctgcacagacgcgtgcttcttcttgttgttgcgcgtagtcgcggctgacactgtgcaagtgtcagcggaattcttcggctgctgtgttgcagtcgtagatcctcccccacttaaggaaggagccaccatcccgagtagactcgggaggcgtgggtgcctgatggcattcacgtagaacggtgtatgcccggtcgaggcatgcaccgagttgttgatggcgaactccgccatcggcaagcactcgctccaatgttggaacgagtgagcgtagcgcttaagcacgtctacgagcacgcggttcacgcgctcggtctgcccgtccgtctgcggatggtctgcagtcgacatcgaaagttgactcccaagaagtgtaaacacttcttgccaaaggtgtgcagtgaagcgcgggtctcgatccgacacaatgtcgatcggcatgccatggtgtttgaacaccatgtcaacgaacagacgcgccgtctgtttcgcagtcacttcagcgggtactgcagcaagatgtaccatcttgctgaagcggtcaacaaagaccacaacgcccgtgttcccctggcggtccgggggaagaccgaacacgaagtccaaagacatggactgccaacactcccgtggagttggtagtgactgcaagggagtctgcgcgaaaggcgcaggcttcacacgttgacaaacctcgcaagcacggacgtacttgcgcacccatttatactggtgggcccagtagaagtctcgcgtgagaagaaggtgtgtcttctcacggcccggatgccccgcagtcgctgcatcgtgatactcatacatgatcctgagtcgcagatcatggtcattgggcacgacaacgcggtccgcgttgtcgtcgactgcactgtagagtaataacccatcgtgcacccggtaacggtgtgcacgagcacgaagatgcttcggcagcttctgacgagcttggtcagaaggcgctgagccgtaggccagcaagagcttcgcgtccgcgtcgtgcgcgtacgcgaccttcacgtcgtccaacagtgacgacgtcggggtgctcgatcgcatggcgtcaatggcattgacatcggcatcagccgtggcgtagtcaggtcgacgcgagagcgcgtcggccaccacattgagtcttccgggtttgtactcaacccggaagttatactctgcgaagaatgggagccatctcgccatccgttgcgagatgtgcggcgacttcacagccgtccgcagcgacgcgtggtccgtatagaccccgaacggtttgcttccgagtagatacactcggaacttcgcgagtgcgtacttcatggcaaggagctccttgtcatgtaccgggtagttgcgctcagctggcttcagctgacacgattggtgtagacgacacggtcatgaccctcgtgatcgtgctgcatcaacgcacatccgattgcgaagtcggatgcgtcacacacaacgtggaatgggcgatcttggtcggccaccgccaagatcggcgcctcagtcaagccccgcttgactgcatcgaaggcctgctgacactcagcagtccaaacccactcggcgtccttcttcaggagctgtgacagcgggcgtatcatgcccgcgtagtccttcacgtacttgcacaagtacgtggccaagccaaggaactgccgcagttccttgacgttcgacggcgtcggtcactctgaccttcttagggtcagggcggacgccgttcttcccgacgagacacccgagcacgggtatttcgctcgccccgaagatgcacttcttcaggttcgcatagagcttgtgcttgcgcatgagcgcaagtagcttccagagatgcaccttgtgcatctcaacatcgcttatcccgtccacagcccggctgtggacgaacacatcgtcgaagtagctcggtgcgaagtcgcgcaccgagcgcaacaagtgcgtcacgcacctgttgaaggtcgcaggggcgttcttcagaccctgcgacatcactagccactcccagagcatgccgctcggcgtgctcactgccgtgagagggatatcgctctcacgcatgaggatctgatagaacccatcgcgcagatcaagagcactgtagatagtgctcctggccatcgaatcgatgataacatcttttcgaggtatcggcgtctgcgccggtatcgtcgcatcgttcagcttgttatacgcatgaacgatgcgccagccgccctgtggcttcttgatacagaacgtcggagcactgtgcggggatttcgattcccgcacttgtccagctttgcgacgactttcgaagaagtcgtcgatcgctttgacctgctctcgcggcagtggccactgccgcgtgacacagtacttcgtccccgccacgagatcaatctcgtgctggatgcccttgtcctgcggaagctccgcaggaatctcttccggaagtacgtccgcgtactcccgtaagatctcgtagtagggactcgttttcaatgagtcccagctctgctcttcaaagcgctccttcgtcgtcttcgcactgagagtgtcctcgctctcagtggtggtcttcatgaagaactgcctcagttcttcattctcgctcttcgttctctcggcgtccgagagaatgcatatttgctcgatgcgtccatcgtgcaagtcacgcgcgaagcgcttccagctcaggactggaagcgaagtcaactccgacgcttgcgtcggagggttagcgagtgtcatctccctgtaccggaacccggcacaggtacgcgtcaagacgttcaacgtccggcttctcagcctccgtctgcccggcagacattccttgtagcgtctcggacccaggccgagacttgcgcagcgaccttcgcatgcgccgacttcttgttttgcggagcccggctccgcttggttcttgacctcgtccaggcccagccgtggacgggtgttcttctttagtgccgccggcgggttcatcccgcgggcgagcgacttcaagcccggcttggtcacccggcgcttcgtcgtgcagcccggctgcacgacagcatgcaagtttttccggtgcgggacgtttgcaaccgtccgcaccgcctgcagcgtcggctcccggagccgacacgccatctttacctcgacgcctgttattggcggagacccccattagggagggtgcgttggctccccgagccgacgaatcaaattcaccaaagccatcgactcccggagtcgacggcgttacgtcaccttggctcttattattggccaggacctgatccaatcagattcgcgtcagcctccacggctgaggcgtgtgactcgtctgcgtcatccgtgccccttgaggtcggagactcttcctgattcgctgaaaagcgggtgtcgatctccgagatcaacacattttctccttcagccgtcggcggcgacgccgacgcttgctgctcttgcgtgctcgcgcgcgcccagggcgttccgggacagcggcattaggcgctgtctcgagtggggagtcgcgcgcacctgtcggtgcgtgcgtagcggcaacagggccatcgctcactgttccgctgtcgcgaccgaagcgcacgagagtgcgcttctcccaatcgatgaccggatcatgtcgtgcaagccacggcatgcccaatacaatgtcaaacttatcgtctagatccaggacgataaaggtctcgacaaactcttgatcttcatacgggtagcgcacgcgtaccatgcgcttttcggtcttcacgatggcacccgttgccagtcgtacttccaacatacttcgaggtatctttaaatcctcgaagtcaagccttgatagacttcgcagtcaaacaaagttcttcgacgcgccagaatctaccaaagcacggagagagccgcttgctctcatcgagttcacattcaggatgacaaggtcaggcttgtcatcttggttcttgcagtgagaatgaacctcactgggggctgcagtcctcagtgtcgcgtgtccaaggtcgacacgcggaactgcattaccagtagggcgccccgcgcctactggcgtccagcgttttttgtttggttgcgacggtgcccggcaccgccgcgatagccaccctgctggtgcacgggggccgtgcactcccgagcaaagtgaccgattctaccacaacggtagcatcgcacattgtttccctgcgactgctggggtccaacagttgcagcacacgagaggtccatgggtaatgggcctcccgtcctcactaccgggcgtggctgtggcctcggcgcatgtgcatgcagcttagcctgccgcaggctaaactcctcctgcattgcaagagtaattgcagcttcgagagtactcgggtactcacggaagagataggtcttcacaggcccatctctcagccccttcatgaacgtgacgaccttggtcgcctcgtcgatcggattggtcacgatgttcgagaccaagtaccgtgctctctgagcgtaagcatggacatcatgcttgccctgctgcaggtcgaggaaccccgccctcgaccggaactggttttgcggtggctcaaacgcttgtctgagctcttccttgaaaccctcgtacatgctaaagcacgtaggatccgagagtcggcgtccatacgcccaacttcttgcacgtccgccaagacatgacatggcgaacgtgaccttcgacaacgggtcgacgatgcgtcgagccgcaatggcagtgtcgagttcgacaagccaacggagaagaggcccgccctctcttccaacgaaattgctcacgctgagcttcagcgattgcgcgcgcggtgtcgtcggggacgacaccgtggtagacgaagcagcatctcgctgctccctcatgatgaatcccagagcaacaccatgttgctctgtcggcgttagcgtacgcagcatcgtagctacagccgcctcaccaatgactgttgacagtcgttggagagcttcccactctgggtccgacaggtggggacagtcagcgcgtgcaacgtgagttgcaggcgtagtggagctttccatggacacctccgtatcgatgggaaggttctcagctccgcgttcgtgcggtgacgtacgaactcaggtagtcggtcgttggacggactacgaagtgctaccaggtgcaatgggcctactttggctcactactttagcttacacgtgtgcgcgtgtatgtgaggaagcgtagcttagtttaaattagagttaattatactcgggcctccgagtatagattaatctaaataaacgatccaaataatgtttttgggttaaaatgagaactgctatttttgttttatgtttctgacttcctctaaatgtaatattctaagataggaatctgccaaaggctggttggaagaattccaatgctatgcatgtcgctcattggctaagagatgctgctctcagccaataggaatcctaagtctctatggaccacccgtcgtggtggtcgtaaatgtatgtagcctttggtgtgtctacaccaaggtcgagaaagtctttcgaacctctaacagacgtcgtatctgttagagttacaagtgactgtagccacttgtgcgtgtaaccctgttacatgcggccattgtcttgcctcgctcgttcagaaaagggcgattgctcagcgcctggcgaagaagtgcgaggtcctcctccgcggagaaattgcgccgcttcgggcccatcgttgttagctggctgatctcgttgtgaggacagttttctccaaagccaccaattctgtaactctaattctctaccgagggctggtggagcccgttttttgttgctttgtgcgggaatgggaatagaatccctgctgcgaaatatctctaatagagatatttcgcagcttgacagcttgaactggcaaattcttgggcagatgctgtggctgcgaagcaagcgcaggagatggccgtggctaataagaaaagaaattaaaaaaaaggtttataccaaaattctcctatcccagccttcgcggagccctattatcagatgtgcatgtttgcggccgcgctccacaggagcgcggccgcaaacaatacgtacagagcgagtggttaaaaagtgagtgaactccactatacccgttccatcattaaacacgcctgtacgttaaaactcatccaacgttttttatgggttttgaaggcatcaatttgaaaaaataattataatattccgtttttgttattatgtgtgagaataatgtacaatacttcgaactattgaaaatgtagctccaagaataattgcaaaaagaatcaataccattatggaacttaattttgagtcggttacttttgaatttagattcggtcactttaaattttaaatgcctgatcggttacttatgtcttagagaggctccttgactaccggagcgaggcggaggtctgtaaggggcggcgcgtaggccggaggagttgcactgcaatgtaggttctatctttagatgcgaacaggatgcacaccggagcgtaacagaggtcgtgcgctccgcagtccacataagttacatcatctcgactgactcagccatgtgtgcgggagttggcgacggaaaagatgcttctaaaggagaatccggtggcccactcatcgctaatggcgtgctagtcggaatcgtgagctctggtgctgaaaactgtggtgagatgcctggactgtacacccgcgtcgccggtggctacgacttcatccacgacatcctggacggcggctccagcgacaatgtcaccgtgctgcttaccccggaagacgacgcagagtcttctggagtagctgaatagcaacagcaaccgaacatgtgccacggtaggagtgcttaaagcaatgaagtgtagtgtggtggttcgtccctcccctgaggaacacgagcacgatctgcgaaacagcgtccaggtcgtgatcgacttgacggagtagctggtgtggcacaccgagcagcagttggtgacgaagagtgtggggacggcggctagtggtgacggaagcgagccagtgggctaccgttacgtgcgacaggaggtagcagttgaagttgacggctgcggaagattgcaaggcgaggtgacctgcgaacaggacagagaactagtatgcagagaggagaggtgacgctggagagcgagcgtgaggccaggaggccacgaggaaggagatgagggcccgagagggagaggtccaagtaggctagaaggcgccgagtggataggatagggttgatggacgggggttagaagtaagtgagggcaacgaactgcggtgtggcagctcgaccctcagttgtgatttgttgctggatagtgacgagccaagacttgtaatacactcagttgcgccgaaacgcgggttcctgtgacctagtaccagggaagtgtcttgcgaccagggaagtgtcggctagatacgggagtaagtggcataaggtaagcgatagtggcgggcggtgcacagatgagggcgatgtattgagtagggtggcgggaccacggagagaagccgtgggggagcgcgaggcgcactgctggcagcaccttggccgtgaaggacagcgctttcgagtgcttgggcgtgcccgagtgccgtgacgaagatgctgttcgacctgtttgcatgtccggtaggggtcgcctgtggcttgccggagcccaggtcaattgtatttcccctcccagctgtccctatctccgacacgcctggtgaaggggccagtatctgtctggttgatcatcgtactgcctcgtacctgctggcagtcttgacttgacggaaactggaggcggcggcggacacggtggcgctggtactggacgcgcatcgaccccaccaccgacactgggagcagcgagaatgagagcggcggcggcatccatcgtcgtccgtgagaaggcgaaagaactgaagttgacgaaattcaaggggcttgacgacacgatgcccgtgagcatgtggctcaagacggtgcgtcaggaggtgcgtcggcaggcggtcaccatgggcgtcgagtggaacgagaatcagctacaccacgaggtcgctccgcacttggagggcgaggcgaagcgctggttcgcgaccgtgatggagtcggtgcagccggaagaagagagcatcaacacgctggcagcgatgctacgcgcgaagtacatgacgcagcggtcaggccccgaggtggtcgacttgctgaacgcgcgtcggcagatgagaggagagcgactcgttgactacgcgcaggcgctgcgcgagatcgccgagcgtggcgagatcggcgacgactggcaggccagcgcgttcttgaaaggcatgagcagcacgaaggggcggcgcacgtgcgcggacaccggccgaaggcgctggacgaagcgctgagtgtggcgattccccaggtcggagactacggcgaagggtacgggatcagactggacgaggcgatggcctcgtgggacgcacgcgaggccacgagtgggcgcgggcccttggcggcggcgaaggcacgtggcggaagagagtagtcggcagttggcggcaacacgtggaatgtggtctcggggtacggacccggctggggcgccgctccgaagccaccacggtacgatactgagggaagaccggtggataccggtaaagacagtgagggtgagtggtggaaggccatcccacctggttttcaactggtaccggccggtacttcaagtggtaccactggcgggtcaaaatttcaaaccaatggcaggcagacgcgcgttgggagcggtaagtggccagcgagcgaccagaacacgaagaaaccggctaagacctttaaggtcgagagtaagtacggaggaggagcgcatggatcgggtagcggcccgagcaatccggcgctggctactcgagaaagacgactgcgcaaccatgagcgctacatgacaagcagggcgccacagcgagcgttcgtaccgagagagggcacagagcgctattactgcggcttcacgaggcacttcgcgcgcaacttcacgctgaagcaagccaccttgggggcgcgatggtggcgtcttagaaggcagagaacgacgagaacgggtcgggaaacggtccgcgagcataagatccccggtcttaccgctcgcaagacctgatccgggtaagaagttggcagcaggacgagggcgggccaacgggcagcagcaacagctcccgcgtggcgctgcgaggacgagtgcaacggcgatcagaagccggagcagcggagtgaagaaagtggcggccggagcggcgaggaagcaagtccggcacggcgtggttgagactggggatggcggtgtgctgcatgcgcggtatgctgctggtggacaagcggctctgcagtctggggatggcgcgacacatacagtgcccgtggccgtcacagcggcggataataaagagttgacgagcacgggtgcggagccgcgtgtggtgacggagacgaagcacgtgcggtttgcggtgaccgaggacagcgctcaggaagagttcgtcagcgaggagaagacgccgatgacgaagacggccaaggacaaggtcgagaaggtcgtggacgtgggcgacgtcggcgacacgggcgcagacaacaagaagcgcgccgtagtcgatttggcgtgcgcgagcgtcagaaagtcgaaggaggagctggaggctgcggtgtccaagcagctggacgattggctggagcagttcggcgcggacggcacggcggtcgatgtggcgaacaccgacaacacggtgacgaacggcaaggggggggtgacgacggctcgcccgagtcggtgcagaaggtgatgacggcggaagtgtggcgacaagacgttgtcaaggccaaggtgctgcgtgtgaaggcggctgaagtgatgcagagagctgtgcgtgccgacgaggaggcacggcacctgcagaagcgacagaagcggaaggagcgagagcgcgtgtggcgtgagcgacgtgctgcacgtgggcaactcgacggtgggaaagcaggtgacggcgcgaaaactgtggtggtggtgggcgatgtgaaggcccgcaggaagcagcccgtactccagttcgtggcaatggcaacggacaccgaggtgacggcgaagagcgacgagctcgtccgcgtgtcgaggaccagacagaggtatgataagttggcgcgcaaggcgaaggcgcgtgaggaccggaagctgcgcgagtggctagcgacgcagtcgtacccggacgagacgtacatggcgttcgtggacacgaagcgacggcgcggcaagggcgggccacgactgttgagtatcgaagaggcgacggcgatcggattcacgccgccgaaggcaacgacggtggtgacgagagtggcacggcgaaggatgccgaagagaagctaccagtacgagagtggcagcgtctacgcgtccccgagtgtcgtgtggacggaggacggtgcgagaccagcacgagttggacgactacgagctgtgcaggccctggcggtggactcactaccaacggccaaggtcgaggttggagacgagtggcgggacatcaagttggacaccggcgcgcacttctgcgtggctggcgagtcgtggaaggagtacaccgagcggctcggcacgctgccacccgtagacttcgtcgaagggttcacgggtgcagtggccaaggtcgaaggagtgtggcggttcagattcaggaagcagtacgggcagagcatgttggtggacgcgctggtggtcgaaggcgcggccgaggagttcttgctcggcgaggattggatgctgacgaacggagtcaagatcgacttcacgtcctgtgagatgaaatgttatgacggaaacgacaagaaggtcgtgccgttcagctgcacggcggagagcgagagcgaggagagagcagtaaaggtccgtctggtgcggaaggagcgagtgcagacgcgaacgtgtcgtcgtgtggagctggcagtggcacctgagggcactgtgggtttgttcacgcccgccctcggtatagagccgcacctgttgctagcacccacattgacaacaattcgtaatgacaaaggggtcgttccgatcatgaacttgatagggcgtacctcgaagttaccgtctcgcgagaagctgggaacttgggctccgataactgaagacacgcagatcatggaagagaccggagagttcgacagagagagcgtgaagcagtggctgcaggagaacgcacctctgagcaatgaagacgagctgaaagttggagacatggacaacgaggacagggagttgttgttgcggatgttaagacactaccctactctactggagccacgtgaggggtgtccacctcagactacgttgggtgtgagtcacgagattcatactgggagtgagccaccgatcaaagtgcggtcacgacggcactcgcactcggaacaggtggtcattgacgaacggacggacaaggtgttggcagacggagcgatcgaggaggccaatggggcctggggttttactgtcgtgttagtgcgcaagaaggacggctcggtcatattttgtatcgattatcgcctcctaaatgctatcactaagaaggacgtgtaccctttacctcgaatcgacgacacattggacaatttggatggagcgaggcgcttcaccagcctcgacttgcaccacgcggggtactggcaggtgcctgttgcagagaaggatcgtgataagaccgggttcatcacaaggaaggggttgttccggttcgtcaggatgccgttcgggttagcgaacgcacctggcacatttcaacggatgatggacgctgtattacgggggcttacgtggcagagctgtctagtctacctagacgatgtcattgtgttctcgagaggcagtgtagtgcagcatgtagtgcagctggcagcggtgatggagcggttggcgagggtaggcttgtcgttgaaggcgagcaagtgctcgtttgcatcggagaagttgaattatcttggacacgagtcggacggcgctggagtgcgcccgatgccgagtttggtcgagagcgtgaagaacttccccacccccactgatgcgacggaggtgaagaggttcacatggccggatacaacagggttcgtgccggagttcgctgcgagggcggctccgatgactaagttgttacggaagggagtggtctggcgctagggagagtctcagcaggctgctttcgagtgtttgaagaaggcgttgatggagaggccgctgttggcttatactgactttacgaagccgttcagattggtgacggatgcgtcacaggtggggctcggtgccactcttacccaggacaggagcaaggcgagcagccgactgcctatgcatcagaatcaactcgcctgctgtggcaaagtactgcataacggagttagaatgcgcagcagtggtgtgggctgtaaaaattttcagaccgtacctctatggacgaaagttcgtgttgatgacggatcattcagccttgaagtggctgatgacgtcgaaggagttgacagggcggttgcaccgctgggctttacagttccaggagtacgatttcgaagtagtgtatcgcccgggcgctggcaacgtcgtggcgaacacgttgtccagggcaccggcgcgagtcgtgacagctgctggacgaggagaagtcgagcaacgagacgaaggacgagaagcagcaggcagtgacgaccagctgacgaaccagatgatcaaggacgaacaagcacgggatcgcaccgtgccgaacttggtacagaagggcaagtaccgcgacagagagatcgtggtcgaggacggagtggtgcacatcgtggagtgtgacggcagcaagcgggtggtgctccccaccgctctgtgggcaagtgctcttcatgagatccatgattcgatctacgcgtgtcatctgaagacactgcagacgtatgcacgtgttgctaggagttactggtggccgaatatgcaggtgcatgtccgccggtgggtgcaggcgtgcagagattgcggcacgcggaaggcgaaggccaaagaagtgattccaccgttgaggagtcagggcgttggttgcccaggtgataggtgggctctagatgttgcggggcctttgccggtgacggcaggcgagaatcgatacgtggtggcggacgcgatcaggtacacggtggcggcagcagttccacgccacacggcgccggacatcgcgaagttcatcatggagaagttggtcctggtgttcggaccgatgcgtgagttggtgttggacggagcgccgaagttgagcggcaaagttggtggagcgatcccaccggagctggaaggacatggtgtccatctttgtggcggaagcgcagaacgactgggacagatggctcccctgcgcggtgtatgcatacaatggggcacgacacacggcgacgggcttcagcccgaacgagttgatgatgggtaggcagctgaggacgccgaacgagctcttgcgcacggcgggcgtgacgcaggtcggcgagtttgcagcttaccatcgcgcactggtgcagcagatggcacggtgtgcagcggcagcgaaggcggcactggcgaaggaccagctgcagcgagcaaagtattacaatagatggcagaggacgacaacggagttcggcgtcggagatttggtgtgggtgctcggaccaccacgtggtaagggcattaccaagcttgcacaccagtgggtcggcccagcacgtatcgtagaggacgcaggctttgacaattggcgcgtggtgcgcgaggacacgggtgagcacctcgtggtgcattgtagttttttggtgacgagtcggtgtccaagcgactcgctcggacacgtggcggatcggatcctgagggagctggccgaggccgaggatagcgcagcgacggaaatgagatcaggcggcggagatggcgcccagagcaggcagcacgacggtagtggcatgcggatgcaggacgtggctggcgacaacggccagacggagattcagtcggcgggcgtcggaacggagacacaggcggagaccagtgagcaacggcagagtgctggaagtgcagcagccccagtgatgagtcagcgtaccgctgggtcagaaccaacggcgacgggtcagagagttgacgcggggtcggcgccagcaacggctccggcgggggctcgaactccaggaatagcagggcgagatgctgctgaggcagcaaggccagcggcgaggagggaagcagtggcagacgcagtggattcgccacaaaagaagcggcgtcggaagaggaaggtgtcggtggacgaagagatcaagcgtggcgatgagcagaccgtagcacccatggcgcggtatccagcccctagcgatagcaagaccggctcggaggcggcaactccgagtggcgctgctctagttacggccatccacagcctcccagtcgaccaataccggcggaaaccctcggaacggcctccatgtctccctcctgtcggctactgaccgctatcgtaggttttaagtacagctctttttgcgtcacggtcctccaccgcgtagccgcctattgaggtcacggcgaccacagttcggagctttggcggcgtctgttgtacgcgtgcactcacagaatcaagctccgcaagcgtgtccgcgtcggattccaaatggccgtttgcactgtgtgcgattcctatcgtaggttttcaaatacagctctttttgcgtcacggtcctccaccgcgtagccgcctattgaggtcacggcgaccacagttcggatctttggcggcgtctgttgtacgcgtgcactcacagaatcaagctccgcaagcgtgtccgcgtcggattccaaatggccgtttgcactgtgtgcaattcctatcgtaggttttcaaatacagctctttttgcgtcacggtcctccaccgcgtagccgcctattgaggtcacggcgaccacagttcggagctttggcggcgtctgttgtacgcgtgcactcacagaaccaagctccgcaagcgtgtccgcgtcggattccaaatggccgtttgcactgtgtgcggttcctatcgtaggttttcaatacagctctttttgcgtcacggtcctccaccgcgtagccgcctattgaggtcacggcgaccacagttcggatctttggcggcgtctgttgtacgcgtgcactcacagaatcaagctccgcaagcgtgtccgcgtcggattccaaatggccgtttgcactgtgtgcgattcctatcgtaggttttcaaatacagctctttttgcgtcacggtcctccaccgcgtagccgcctattgaggtcacggcgaccacagttcggagctttggcggcgtctgttgtacgcgtgcactcacagaatcaagctccgcaagcgtgtccgcgtcggattccaaatggccgtttgcactgtgtgcgattcctatcgtaggttttcaaatacagctctttttgcgtcacggtcctccaccgcgtagccgcctattgaggtcacggcgaccacagttcggagctttggcggcgtctgttgtacgcgtgcactcacagaagcaagctccgcaagcgtgtccgcgtcggattccaaatggccgtttgcactgtgtgcgattcctatcgtaggttttcaaatacagctctttttgcgtcacggtcctccaccgcgtagccgcctattgaggtcacggcgaccacagttcggatctttggcggcgtctgttgtacgcgtgcactcacagaatcaagctccgcaagcgtgtccgcgtcggattccaaatggccgtttgcacggtgtgcgattcctatcgtaggttttcaaatacagctctttttgcgtcacggtcctccaccgcgtagccgcctattgaggtcacggcgaccacagttcggatctttggcggcgtctgttgtacgcgtgcactcacagaatcaagctccgcaagcgtgtccgcgtcggattccaaatggccgtttgcactgtgtgcgattcctatcgtaggttttcaaatacagctctttttgcgtcacggtcctccaccgcgtagccgcctattgaggtcacggcgaccacagttcggagctttggcggcgtctgttgtacgcgtgcactcacagaatcaagctccgcaagcgtgtccgcgtcggattccaaatggccgtttgcacggtgtgcgattcctatcgtaggttttcaaatacagctctttttgcgtcacggtcctccaccgcgtagccgcctattgaggtcacggcgaccacagttcggatctttggcggcgtctgttgtacgcgtgcactcacagaaccaagctccgcaagcgtgtccgcgtcggattccaaatggccgtttgcactgtgtgcgattcctatcgtaggttttcaaatacagctctttttgcgtcacggtcctccaccgcgtagccgcctattgaggtcacggcgaccacagttcggatctttggcggcgtctgttgtacgcgtgcactcacagaatcaagctccgcaagcgtgtccgcgtcggattccaaatggccgtttgcactgtgtgcgattcctatcgtaggttttcaaatacagctctttttgcgtcacggtcctccaccgcgtagccgcctattgaggtcacggcgaccacagttcggatctttggcggcgtctgctgtacgcgtgcactcacagaaccaagctccgcaagcgtgtccgcgtcggattccaaatggccgtttgcacggtgtgcgattcctatcgtaggttttcaaatacagctctttttgcgtcacggtcctccaccgcgtagccgcctattgaggtcacggcgaccacagttcggagctttggcggcgtctgttgtacgcgtgcactcacagaatcaagctccgcaagcgtgtccgcgtcggattccaaatggccgtttgcactgtgtgcgattcctatcgtaggttttcaaatacagctctttttgcgtcacggtcctccaccgcgtagccgcctattgaggtcacggcgaccacagttcggagctttggcggcgtctgttgtacgcgtgcactcacagaaccaagctccgcaagcgtgtccgcgtcggattccaaatggccgtttgcactgtgtgcgattcctatcgtaggttttcaaatacagctctttttgcgtcacggtcctccaccgcgtagccgcctattgaggtcacggcgaccacagttcggagctttggcggcgtctgttgtacgcgtgcacacacggaatcaagctccgcaagcgtgtccgcgtcggattccaaatggccgtttgcacggtgtgcgattcctatcgtaggttttcaaatacagctctttttgcgtcacggtcctccaccgcgtagccgcctattgaggtcacggcgaccacagttcggagctttggcggcgtctgttgtacgcgtgcactcacagaaccaagctccgcaagcgtgtccgcgtcggattccaaatggccgtttgcactgtgtgcgattcctatcgtaggttttcaaatacagctctttttgcgtcacggtcctccaccgcgtagccgcctattgaggtcacggcgaccacagttcggagctttggcggcgtctgttgtacgcgtgcactcacagaaccaagctccgcaagcgtgtccgcgtcggattccaaatggccgtttgcactgtgtgcgattcctatcgtaggttttcaaatacagctctttttgcgtcacggtcctccaccgcgtagccgcctattgaggtcacggcgaccacagttcggatctttggcggcgtctgttgtacgcgtgcactcacagaatcaagctccgcaagcgtgtccgcgtcggattccaaatggccgtttgcactgtgtgcgattcctatcgtaggttttcaaatacagctctttttgcgtcacggtcctccaccgcgtagccgcctattgaggtcacggcgaccacagttcggagctttggcggcgtctgttgtacgcgtgcacacacggaatcaagctccgcaagcgtgtccgcgtcggattccaaatggccgtttgcactgtgtgcgattcctatcgtaggttttcaaatacagctctttttgcgtcacggtcctccaccgcgtagccgcctattgaggtcacggcgaccacagttcggatctttggcggcgtctgttgtacgcgtgcactcacagaaccaagctccgcaagcgtgtccgcgtcggattccaaatggccgtttgcactgtgtgcgattcctatcgtaggttttcaaatacagctctttttgcgtcacggtcctccaccgcgtagccgcctattgaggtcacggcgaccacagttcggaactttggcggcgtctgttgtacgcgtgcactcacagaatcaagctccgcaagcgtgtccgcgtcggattccaaatggccgtttgcactgtgtgcgattcctatcgtaggttttcaaatacagctctttttgcgtcacggtcctccaccgcgtagccgcctattgaggtcacggcgaccacagttcggagctttggtggcgtctgttgtacgcgtgcactcacagaaccaagctccgcaagcgtgtccgcgtcggattccaaatggccgtttgcactgtgtgcgattcctatcgtaggttttcaaatacagctctttttgcgtcacggtcctccaccgcgtagccgcctattgaggtcacggcgaccacagttcggaactttggcggcgtctgttgtacgcgtgcacacacggaatcaagctccgcaagcgtgtccgcgtcggattccaaatggccgtttgcactgtgtgcgattcctatcgtaggttttcaaatacagctctttttgcgtcacggtcctccaccgcgtagccgcctattgaggtcacggcgaccacagttcggaactttggcggcgtctgttgtacgcgtgcacacacggaatcaagctccgcaagcgtgtccgcgtcggattccaaatggccgtttgcactgtgtgcgattcctatcgtaggttttcaaatacagctctttttgcgtcacggtcctccaccgcgtagccgcctattgaggtcacggcgaccacagttcggagctttggtggcgtctgttgtacgcgtgcactcacagaaccaagctccgcaagcgtgtccgcgtcggattccaaatggccgtttgcactgtgtgcgattcctatcgtaggttttcaaatacagctctttttgcgtcacggtcctccaccgcgtagccgcctattgaggtcacggcgaccacagttcggagctttggcggcgtctgttgtacgcgtgcactcacagaaccaagctccgcaagcgtgtccgcgtcggattccaaatggccgtttgcactgtgtgcgattcctatcgtaggttttcaaatacagctctttttgcgtcacggtcctccaccgcgtagccgcctattgaggtcacggcgaccacagttcggagctttggcggcgtctgttgtacgcgtgcactcacagaatcaagctccgcaagcgtgtccgcgtcggattccaaatggccgtttgcactgtgtgcgattcctatcgtaggttttcaaatacagctctttttgcgtcacggtcctccaccgcgtagccgcctattgaggtcacggcgaccacagttcggagctttggcggcgtctgttgtacgcgtgcactcacagaaccaagctccgcaagcgtgtccgcgtcggattccaaatggccgtttgcactgtgtgcgattcctatcgtaggttttcaaatacagctctttttgcgtcacggtcctccaccgcgtagccgcctattgaggtcacggcgaccacagttcggagctttggcggcgtctgttgtacgcgtgcactcacagaatcaagctccgcaagcgtgtccgcgtcggattccaaatggccgtttgcactgtgtgcgattcctatcgtaggttttcaaatacagctctttttgcgtcacggtcctccaccgcgtagccgcctattgaggtcacggcgaccacagttcggagctttggcggcgtctgttgtacgcgtgcactcacagaatcaagctccgcaagcgtgtccgcgtcggattccaaatggccgtttgcactgtgtgcgattcctatcgtaggttttcaaatacagctctttttgcgtcacggtcctccaccgcgtagccgcctattgaggtcacggcgaccacagttcggatctttggcggcgtctgttgtacgcgtgcactcacagaaccaagctccgcaagcgtgtccgcgtcggattccaaatggccgtttgcactgtgtgcgattcctatcgtaggttttcaaatacagctctttttgcgtcacggtcctccaccgcgtagccgcctattgaggtcacggcgaccacagttcggagctttggcggcgtctgttgtacgcgtgcactcacagaaccaagctccgcaagcgtgtccgcgtcggattccaaatggccgtttgcactgtgtgcgattcctatcgtaggttttcaaatacagctctttttgcgtcacggtcctccaccgcgtagccgcctattgaggtcacggcgaccacagttcggatctttggcggcgtctgttgtacgcgtgcactcacagaaccaagctccgcaagcgtgtccgcgtcggattccaaatggccgtttgcactgtgtgcgattcctatcgtaggttttcaaatacagctctttttgcgtcacggtcctccaccgcgtagccgcctattgaggtcacggcgaccacagttcggagctttggcggcgtctgttgtacgcgtgcactcacagaaccaagctccgcaagcgtgtccgcgtcggattccaaatggccgtttgcactgtgtgcgattcctatcgtaggttttcaaatacagctctttttgcgtcacggtcctccaccgcgtagccgcctattgaggtcacggcgaccacagttcggagctttggcggcgtctgttgtacgcgtgcactcacagaagcaagctccgcaagcgtgtccgcgtcggattccaaatggccgtttgcactgtgtgcgattcctatcgtaggttttcaaatacagctctttttgcgtcacggtcctccaccgcgtagccgcctattgaggtcacggcgaccacagttcggagctttggcggcgtctgttgtacgcgtgcactcacagaaccaagctccgcaagcgtgtccgcgtcggattccaaatggccgtttgcactgtgtgcgattcctatcgtaggttttcaaatacagctctttttgcgtcacggtcctccaccgcgtagccgcctattgaggtcacggcgaccacagttcggagctttggcggcgtctgttgtacgcgtgcactcacagaaccaagctccgcaagcgtgtccgcgtcggattccaaatggccgtttgcactgtgtgcgattcctatcgtaggttttcaaatacagctctttttgcgtcacggtcctccaccgcgtagccgcctattgaggtcacggcgaccacagttcggagctttggcggcgtctgttgtacgcgtgcactcacagaatcaagctccgcaagcgtgtccgcgtcggattccaaatggccgtttgcactgtgtgcgattcctatcgtaggttttcaaatacagctctttttgcgtcacggtcctccaccgcgtagccgcctattgaggtcacggcgaccacagttcggatctttggcggcgtctgttgtacgcgtgcactcacagaatcaagctccgcaagcgtgtccgcgtcggattccaaatggccgtttgcactgtgtgcgattcctatcgtaggttttcaaatacagctctttttgcgtcacggtcctccaccgcgtagccgcctattgaggtcacggcgaccacagttcggatctttggcggcgtctgttgtacgcgtgcactcacagaatcaagctccgcaagcgtgtccgcgtcggattccaaatggccgtttgcactgtgtgcgattcctatcgtaggttttcaaatacagctctttttgcgtcacggtcctccaccgcgtagccgcctattgaggtcacggcgaccacagttcggatctttggcggcgtctgttgtacgcgtgcactcacagaatcaagctccgcaagcgtgtccgcgtcggattccaaatggccgtttgcactgtgtgcgattcctatcgtaggttttcaaatacagctctttttgcgtcacggtcctccaccgcgtagccgcctattgaggtcacggcgaccacagttcggatctttggcggcgtctgttgtacgcgtgcactcacagaatcaagctccgcaagcgtgtccgcgtcggattccaaatggccgtttgcactgtgtgcgattcctatcgtaggttttcaaatacagctctttttgcgtcacggtcctccaccgcgtagccgcctattgaggtcacggcgaccacagttcggatctttggcggcgtctgttgtacgcgtgcacacacggaatcaagctccgcaagcgtgtccgcgtcggattccaaatggccgtttgcactgtgtgcgattcctatcgtaggttttcaaatacagctctttttgcgtcacggtcctccaccgcgtagccgcctattgaggtcacggcgaccacagttcggagctttggtggcgtctgttgtacgcgtgcactcacagaaccaagctccgcaagcgtgtccgcgtcggattccaaatggccgtttgcactgtgtgcgattcctatcgtaggttttcaaatacagctctttttgcgtcacggtcctccaccgcgtagccgcctattgaggtcacggcgaccacagttcggatctttggcggcgtctgttgtacgcgtgcactcacagaatcaagctccgcaagcgtgtccgcgtcggattccaaatggccgtttgcactgtgtgcgattcctatcgtaggttttcaaatacagctctttttgcgtcacggtcctccaccgcgtagccgcctattgaggtcacggcgaccacagttcggagctttggcggcgtctgttgtacgcgtgcacacacggaatcaagctccgcaagcgtgtccgcgtcggattccaaatggccgtttgcactgtgtgcgattcctatcgtaggttttcaaatacagctctttttgcgtcacggtcctccaccgcgtagccgcctattgaggtcacggcgaccacagttcagagctttggcggcgtctgttgtacgcgtgcactcacagaatcaagctccgcaagcgtgtccgcgtcggattccaaatggccgtttgcactgtgtgcgattcctatcgtaggttttcaaatacagctctttttgcgtcacggtcctccaccgcgtagccgcctattgaggtcacggcgaccacagttcggagctttggcggcgtctgttgtacgcgtgcactcacagaaccaagctccgcaagcgtgtccgcgtcggattccaaatggccgtttgcactgtgtgcgattcctatcgtaggttttcaaatacagctctttttgcgtcacggtcctccaccgcgtagccgcctattgaggtcacggcgaccacagttcagagctttggcggcgtctgttgtacgcgtgcacacacagaaccaagctccgcaagcgtgtccgcgtcggattccaaatggccgtttgcactgtgtgcgattcctatcgtaggttttcaaatacagctctttttgcgtcacggtcctccaccgcgtagccgcctattgaggtcacggcgaccacagttcggagctttggcggcgtctgttgtacgcgtgcactcacagaatcaagctccgcaagcgtgtccgcgtcggattccaaatggccgtttgcactgtgtgcgattcctatcgtaggttttcaaatacagctctttttgcgtcacggtcctccaccgcgtagccgcctattgaggtcacggcgaccacagttcagagctttggcggcgtctgttgtacgcgtgcacacacagaaccaagctccgcaagcgtgtccgcgtcggattccaaatggccgtttgcactgtgtgcgattcctatcgtaggttttcaaatacagctctttttgcgtcacggtcctccaccgcgtagccgcctattgaggtcacggcgaccacagttcggagctttggcggcgtctgttgtacgcgtgcactcacagaaccaagctccgcaagcgtgtccgcgtcggattccaaatggccgtttgcactgtgtgcgattcctatcgtaggttttcaaatacagctctttttgcgtcacggtcctccaccgcgtagccgcctattgaggtcacggcgaccacagttcagagctttggcggcgtctgttgtacgcgtgcacacacagaaccaagctccgcaagcgtgtccgcgtcggattccaaatggccgtttgcactgtgtgcgattcctatcgtaggttttcaaatacagctctttttgcgtcacggtcctccaccgcgtagccgcctattgaggtcacggcgaccacagttcggagctttggcggcgtctgttgtacgcgtgcactcacagaatcaagctccgcaagcgtgtccgcgtcggattccaaatggccgtttgcactgtgtgcgattcctatcgtaggttttcaaatacagctctttttgcgtcacggtcctccaccgcgtagccgcctattgaggtcacggcgaccacagttcggatctttggcggcgtctgttgtacgcgtgcactcacagaatcaagctccgcaagcgtgtccgcgtcggattccaaatggccgtttgcactgtgtgcgattcctatcgtaggttttcaaatacagctctttttgcgtcacggtcctccaccgcgtagccgcctattgaggtcacggcgaccacagttcggagctttggcggcgtctgttgtacgcgtgcactcacagaaccaagctccgcaagcgtgtccgcgtcggattccaaatggccgtttgcactgtgtgcgattcctatcgtaggttttcaaatacagctctttttgcgtcacggtcctccaccgcgtagccgcctattgaggtcacggcgaccacagttcagagctttggcggcgtctgttgtacgcgtgcactcacagaatcaagctccgcaagcgtgtccgcgtcggattccaaatggccgtttgcactgtgtgcgattcctatcgtaggttttcaaatacagctctttttgcgtcacggtcctccaccgcgtagccgcctattgaggtcacggcgaccacagttcggagctttggcggcgtctgttgtacgcgtgcactcacagaaccaagctccgcaagcgtgtccgcgtcggattccaaatggccgtttgcactgtgtgcgattcctatcgtaggttttcaaatacagctctttttgcgtcacggtcctccaccgcgtagccgcctattgaggtcacggcgaccacagttcagagctttggcggcgtctgttgtacgcgtgcactcacagaatcaagctccgcaagcgtgtccgcgtcggattccaaatggccgtttgcactgtgtgcgattcctatcgtaggttttcaaatacagctctttttgcgtcacggtcctccaccgcgtagccgcctattgaggtcacggcgaccacagttcggagctttggcggcgtctgttgtacgcgtgcactcacagaaccaagctccgcaagcgtgtccgcgtcggattccaaatggccgtttgcactgtgtgcgattcctatcgtaggttttcaaatacagctctttttgcgtcacggtcctccaccgcgtagccgcctattgaggtcacggcgaccacagttcggatctttggcggcgtctgttgtacgcgtgcacacacagaaccaagctccgcaagcgtgtccgcgtcggattccaaatggccgtttgcactgtgtgcgattcctatcgtaggttttcaaatacagctctttttgcgtcacggtcctccaccgcgtagccgcctattgaggtcacggcgaccacagttcggagctttggcggcgtctgttgtacgcgtgcactcacagaatcaagctccgcaagcgtgtccgcgtcggattccaaatggccgtttgcactgtgtgcgattcctatcgtaggttttcaaatacagctctttttgcgtcacggtcctccaccgcgtagccgcctattgaggtcacggcgaccacagttcggatctttggcggcgtctgttgtacgcgtgcactcacagaaccaagctccgcaagcgtgtccgcgtcggattccaaatggccgtttgcactgtgtgcgattcctatcgtaggttttcaaatacagctctttttgcgtcacggtcctccaccgcgtagccgcctattgaggtcacggcgaccacagttcggatctttggcggcgtctgttgtacgcgtgcactcacagaatcaagctccgcaagcgtgtccgcgtcggattccaaatggccgtttgcactgtgtgcgattcctatcgtaggttttcaaatacagctctttttgcgtcacggtcctccaccgcgtagccgcctattgaggtcacggcgaccacagttcggatctttggcggcgtctgttgtacgcgtgcactcacagaagcaagctccgcaagcgtgtccgcgtcggattccaaatggccgtttgcactgtgtgcgattcctatcgtaggttttcaaatacagctctttttgcgtcacggtcctccaccgcgtagccgcctattgaggtcacggcgaccacagttcggatctttggcggcgtctgttgtacgcgtgcactcacagaatcaagctccgcaagcgtgtccgcgtcggattccaaatggccgtttgcactgtgtgcgattcctatcgtaggttttcaaatacagctctttttgcgtcacggtcctccaccgcgtagccgcctattgaggtcacggcgaccacagttcggatctttggcggcgtctgttgtacgcgtgcactcacagaatcaagctccgcaagcgtgtccgcgtcggattccaaatggccgtttgcactgtgtgcgattcctatcgtaggttttcaaatacagctctttttgcgtcacggtcctccaccgcgtagccgcctattgaggtcacggcgaccacagttcggatctttggcggcgtctgttgtacgcgtgcactcacagaatcaagctccgcaagcgtgtccgcgtcggattccaaatggccgtttgcactgtgtgcgattcctatcgtaggttttcaaatacagctctttttgcgtcacggtcctccaccgcgtagccgcctattgaggtcacggcgaccacagttcggatctttggcggcgtctgttgtacgcgtgcacacactgaatcaagctccgcaagcgtgtccgcgtcggattccaaatggccgtttgcactgtgtgatgccgtttgcgcgtgaacgactcggcacaggcagacatcatgggtcaggcagtaatcagatacttcggtggggtaacggtcctcccatcgacacacgatacagcggcgcttcttacggttttgtttcgcgtgaatctgctttgatgccactgatgtgcactgcagcacgtggtctacttcctttcgatctgagcggactggaaccgacattcgatcttgattcacatccgcaccttgcgactctctactaccatagaacatgcggccctcgcttcccacttcccatttatcagctcacccaccaattctgtcatgaaggctctattcgagtcacgagtagtcgaattccgcttcacgagtcttctggtcagatatgtcatgaaggctttatgcgagtcacgagtagtcgaattccgcttcacgagtcttctggtcagatatgcatttgctctagcaatatcaatcagcgctaacgccagtttcttgtgccagcgcttgaaggatgtccgtcatcgatagaaaacctctctcttatctggtcgagtcggtcgacgccctgcatatttttgttgtattggcgaacacaacttggagctggaaattcagcactctcgttaccaaccgtacgcgttacggatgataccgtagatgcatcagcatttgaaaccatatccacgatgtttccatcgcaccacgaaacggcaatcatgttgtgttcactggacacagcctgccgcaggtctcctcgcacacaatcatcgtgatctttgtcaagaattgtatgacctggaaaatgcttgcttttggcccgaatcgtccctcggccgaacagccccttgagtcgaagctcttggagaagctgtaccgatgtataatagttgtccatattgacaactcggttactaccaaccaagggtcgaatgacttctagtacaatctgtcggatcgttagcacgcttttgatctcctctgctagaccccgggcttcttgttcgcttataactccactgagacgatcagtaatactgcttctattacagtgaagcgtgtagttaaaagcaatccacgtagaagagcaacatacagcatatagccggaaatgatactttccagtaggcttcatggggttgaacacaacgagatgccgcccttggcgagagcgacacgccatacttgcctcgtctaacgcaacatcacgctcgacgactatgtacttttgtccggtcactttgagcacatttagtaaaggccgaattcgggctgcagcgtcaatatgcaacgtggtggggttggcattgaagctcagacatctccgcagcagtctgaatcggctgaggctcatgaccccatccaacgcagtagtacttccaccaaatatcaagtcttcaggttgggctccccaataattcgagtattcacctttatcgtttagggccataaagaaaaggataccgagaaatgtcatccgctcctgcagcgtgaaaggtcgtgttgtttgaatgccctttgatacagcgtactcgttggtctggtacagcacttggcgccagaaatacaacggtagataggcaaagaatgaggcgctagctgaatcctcgaatacattccgggcgcaagaaggttgctgttgatccgtcagggtgttcgaaaagattggggggggggcgtcgacacgtccatcgtggtcaaaacgcatgttccggattgtctccacttcttccaagctggtggtgggctcgggctcgaactcatactcctcacaaatgtctgaatctataggatcgtcgatgccaatatcgtcggttgtttctggctggaccaaccccacccacgctggattgttcttcaactgcaccaaagctcgataatgctcaatgccgttttgaatcaaacccactgcgaggtgctccaccgccgactgaaactgcgtatccaaccaccgaacctaaaacagtgacgcgaatttccctttcctaggtcgtctgcacatgcgaccaattatataggctgatccagtcgttttgtacaccttcgacttcatccaaacctccttctcaggagtaaacgctaccaatcgatcaagatacacatcttgtagaagcgccggtggtgatcaggcacgggttgtaccatccaggactggacgaccattttctgtaagtctgccttttgggtttggtggattacccatatctctaccaagcaaaccatcctttccgccaacaagcccattcaatccaaaccccacgttatctccatcgtcatctccacaaactccaacactagcggcacttccaccgccgcctcctccagcttgtgccgttcctaccccgaccacacatacacatcctaaggtcagtgtccacgcatagctccacacgcccacaacagcatcacgcgtacctgaagctgatgtcatggtactgccctcgccgcccacgactcgagccgggccgacgagctcgacgccctgctccatgatcttcgcggcactcgcccgggcgggccttcgtgcttccgcttgccacgcatttccgtccttgagtaatgcctcattgcggccatcgcggttcgcccttcgcgcaataggttttcaagctagcatagtataatgaaacatcaatttttcagaattgaatctaatctgttagagaggtactcgagtcttcggcgttgctaaaataggggatgcgctggtattaggcagtccttgctcgccatgaaaaaataaaataaattaccgcgagaagctctgtgcacatttcatgtgattggatgaaacaaaataaggtaggtcagggtgcgtaaaacagctgcaaatactttaagggcgcactggaactcttccaaaaacaacacaaaaataaatgtgtcacgagcacaaaaatagggctgcatacccagtacagtatgcgaagacgcaaatatcgtctcctaaatcgatcgcgtcctgcgatgcatacgtaagtggctgtgcagattaggcaatcgttttatggaagtcaagtcggtatagccgcgtttggagcagaatgcccaccttttactgggtaatcgcgcagccaagcgatgcatctagaccacgatcgatttcagccctgatttgtactctgattaattaagtggttaaaatctaatcaggggttgctacagatgggagttttagccggttctcacaataatactaccgtgttttgcaaacatacttaaaggtcgtcttttgcgcccttctgccacgaaagggttaatatgtggcacttaagtatgcgtgatcgccaatttgattagtacctactagcagttagagtgtccgcaccagtaaagctaaatcccaatgctaaacctcggttccctacccacaataactttgtgcagtggtgatttagccatctgaaacaatgacttggtttttgtatgggtgatttggccaccgctaaatctgctgccaaatttggcattggaaatagcatccggacttcagggtcatacgaaatccaagacactttaccatgcaccttttacagctacagtaatctgaatagcagatttttcattgcccacgattattagtctggccccaacagtgacagactaattttgaattcagactaattatgaatatctaaaaatatccgttttctagtaagaaaaaatattatttttgtgaaatggtatgtttatacgtattttcaaatattttttatagtttacctatatttatactgggataggaagcaacgttagtgctgctatcgcagaccaaatcggattatacccgtggtacgtcaagtcaaaatattacccctcttgacacccaactggtacatttcctgaaaccggtatgacccctgccgcattgggccctccaaaaggtttatatgcgtgggcagtttgaaccggtatgaatcaataacatatatcgaaccggatggagtgaagtaaagtgaatgattaaagcggatggactactgtagtagcatacaacggcaaacattttcatgacagcagccaatttaccagatctcgcacacacagaacctgatatctagaaaatatgatacctgagtgaacatggcatcgaacccattgaatagccttccctaaccgttagcgatgcagcatctgcgatgctttagtctttatttctccttaaagccacgactagggctccgcgaaggctgggataggaggtttttgggataacccctgttttagtttttttttttttaacgatccacggtcatctcctgcggctgcttcgcagccgcagcatctacccggtaatttacctcaacggcgaagatgcaagacacgacttggcagtaattatacacagtaatgaaacgaaccttgctcgagatctgcttgtagcttgtagagaaaagtgctttttcaaaaagcattgccgtaaagtaggtagagattgactagaatcgtggtcaccacgacagactaattatgaacatttttagccagactaataatgaagacgtcaatttttgctcgacacgaattagtctggcccagactaattttgaagccagactaattttgagcccagactaattactgtaggcactgtagctgatgccaaattcgacctgccatacatgaagcgggtaggtttactcagatttagctttgggtttagctttaccggtggggacactctaaaagcaatcaggaatattttattcataatgtgctgtcacttttcatctgggctcgacacgaaaatatcaaacgcgattcacctggctaattctgtcatccgtccccacaatgttcgctgccaaggacactatttttgctagagttgacggcctcttgctgcgtgatggggtccacatgccacctttttctcagcttctggaagtcaacgcaagtcaagcagcacggcagctattcagcggggagagtgcaagacttggccaagtacgagcggttggcgagctctacgcgtgcagttgtcgtggtgttggcgaccccgttgccatgcctagcgtcactctcttcatcgacttgttgcctctttcgcctccgtcggagggtatccactccaacaaactcttcctattgcgcgaattctacgcgtacctggtcatgacgttgctcgccctccaccaatttcgtaagggaatcccggtactaccatacccaccaaggaaacttttcagggatacgttcctagtgtcgggtgtgtgtgttggcattctgtacggcctcatactgaccgttgggttccctcttccgttcacaacgctgaccattgtgccagtgtggactgtgctgaccctcgtgtgcttgggggttcaatgggcaaagatactccgagaaaccgttggcgcagtgatgatgttcatcgggatggtgaagctttggttgtgcgatatcctgctcgtgttcgtctacccgccatacttctacgtcttctccacgctatctactaacagccaaatcgccttggtactgctcctcccggtcattaaagtgctgatgaggaagctcttctctcgggcagtccagcatctcggcgacgagacgccagggctagttgtatttaacgccgacgtgttcggatccctctttgtggcgtattgtatgcagcggtcgccctcgacctggaccacgacgggtatcatgatgctggatgtggttacaatggcgatatcattacgggatgtggctatcgcgcgaaaagagttgctggaacttgagcgccagctggacaaggcgcacgcgtggcgtagttatcgtggggaagtgggccatatcagtctaggaattcgcatgccaactacgctggagcgcgcgagtattctattggaccaggcagcgggagagtacacgaacggacctagtatcgatatcgtggatgtggctagcaaaaaccgcattatagattattcccagtcgggtaggaagatctttgggtttgctcgaatccatcccgccgatcacggagctgttgctgttgggcgaagatcaccaaacgctgtgattgaagctagctacacactcaaggtgcggagactgttgtgcatggctgaatttttgctgcttctcaactacgtcgaagccatgatcccgctcatcttctgtaagtacatgatatttttttttcagagaagattatgttgggtaggagcaacagcatggatttgtactaatgtatgtgtgaccccctttagctatttacctcgttgctacgttctacctgcccaaccgcgactactacgctatctatgacagcatggaccaccaccagctcttccagacgctgcagaatgtgttgctttactgcattctccaaatggtctcgttttttcctcttggtctttatgctccgacgtatgctggagctgtcaccaattaaacatatcgcctttgttctggaaaagcaagtcgacttcgtgcaaatgtgcctcgtcttttggctattctataacgtccagagctcactgcagcacatgggtcagcaactcaaggaagtggggaagaaacgcagggctaacgcttcttcttgttgcatactgtgttgcaggctatgactacagctttaggtttgcgtggctctctgaaccatcaaattcgtaaaagatgttaggtgaaccgaccacaatactagaggcgaggagttgagtccgaatgaacgatccaagcgactccagacacttcgtgaagggcttgctctattcgctgctgtggcctgaatcaacgttgatgcgttgttttccctgttaaagtcaaataacgtgtgtgaacccagagaagagatgccacaccacgagttcatgataaccgagttgcccgtattcgttgagctggacgtgacccagaacctgtccaatgaacccagcaaggcctcctcgtggatcaaagacgatctcgcgtctctctgctgccaactgcacaataccagcgaagcgctccagagtgcgtgggcgaaagttgagcagctctctcaaacctcgttgaggggcctgcctcctgttcgagtcattatttgcaaaccagagtactacttggaggcggtggacactgcgtctccgcgtgtttgggacgcgcgctaaatcctgaacaagtccaatggggtggttttcgtcaaggtcgggcccccattcaacgttggcaaaaaggtatccgtcctcatgctacgcttcagcggtgatcgatatcgtcaacgcaaagaatgaattcagattccgcgacacgagcgctatgttcattgacgatcgataccagcatatatgacacctgtaaatccaccaacatattgatggagtacctggagggcgacaagttgcccacaacctgcaaactggcatttgttcaactcgagggaggaacctccaaagttcaagaagcacacagctcaaacgccactacaggccccagataacttcactttgtcgaggattttccagtttgcagctgcgtgtgcagtacgcagagtggaaaactgtctacgactaagacagaatgccaccgcagcatacttcctctgggtggaaataattgcaatgacttttttgtcggacgataactttttttctaggtacgcaattggaccgcggattgttgcatttgacgcgccatgagctgcaattggctctccttctttaatcactcaaaaaacatgaaaaatgcccgagatacgatcaaaagggagcggacagcttgcgtcgatgtcgtacttaaaactttcttgttggtgcataagaccggctcgaggcatcagcaaattgcgaaaagcttaacattcaagcctaagtaggtatcatctaacagcgaagagcaccacggcggttattacaagactcagcgctttctttcaaggcgctacatgcgtctgtcactaagaaattgcagagttaccttggatctcaatatgtgaattttgctttttctcgtgtacatgcactctttttaccaggattgtactgtttttaccacatttgcaattatttccgcccggaggaagtatttaactatgcacatccagtacgacgttttaaggttaactcttccgcatcactcttcgatcgagtgggggatttcaaacttgcatttcgttaacttaattctacagcaactttctccaatcactacgtcacacaacatccaatctatccgtctatctagtcacgtagctgcttccactcgcagcaaaaacttcccgcgctcacatgtactctcggatggcagccgcaatcttgtgtagcccccgtgaggtggcgtactgcgccagcatgaggtcgtccgtgactttaatcatgggcttggcgtggtggtacagcagcactctggacacgcggtcgttgtcgtcgtcgttcgagatgacggagatcagcagcggcgtctggtgtcggtcgttcagggcgttcacggccgcgccggccttcagcagcatgtacacgaccgttgctccgtccgggacgttgggactggcggcgtagtgcagggggtggttgccccgactgtcggccttgtagagcagctccggttccgtctcgagcagctttctgatggccttcttgtcgcccttccggacggcgttgtggagactcgagcgtccgtatttgttgctgctgctcgcgggcctgtgaggttccggcttgggagtaggttcctggtcgttcgaggcgggtgacgccggttgggtctcagttgtcgtgggctgggtgaggtggaggttggtagtcgacaggcacttggccgactgcgaccggaagcgtctcgacgctgtagtaggaagacttcggtcggagggctccgcttcaggcggcgcggagtgcgagcgctcgatcctcgcgtctttggagcgagtgcggcgagtgtggggcgagtttcggtgcgactgggcaatgggggactgctccttctccttgctcaccgacatggtggcggtctcggagatggtcacgaggtgcggcgcgtacttccgtccccgaggcatagttagaggggatttgtactgtatgggggaagtttatctgcacggatgcgtgcagggagggagtttggcaatgggaagctggaggcttgactatccagcgcccaaagcgaaaatgcttgagcctgtgacccgtgcgtggtccgcctcaactcgccagcgggtcaactaaaaaaccagctagcgcgaccatgtggtctgcgcgcatccagccgacgtgttggtaccattccaaacccatcgggctccgatgcgagccacgaaagactgctcgactaccagccagttcgagcaagttgacagcggcgaggcatctgtggcgaggcatatgccacgttgagcgcggctgtttcccgagctctcggcgcgccgccgtctgggtggcctgtcgatgtctcgctgacagtcgtcgggttgttgaccaattttcgatgagcagcgcgaggaagatcgatggctcgcatgaggatatcgatgctccgaactctgaactccatacagcccggcaattgtacatgtagtgctgcaagcattgttgctaccggtaagattgattccgccgattgcattggcaacaatgggtcaccgagcacctttgcatgtacatgtatagtgtgatacctgctgctttatttcgtcgacgtactaacagcagatgccgtcgcctgacatgtaagtcggaggttctcttcttcgggtgctggcaaacatgctcatttccttgatgtttttgagtcaacagggtgaggaccagagcttcaacgtgcaaacaagccgtcccacacgccagcctcagttagccctggatgtctgcgccgcggtcagtcaaccaccggtgtggcttcatgccacgcgcgactcggcgacgttgaaaaatcgggaacgcgattgctgttccccagccggctacgagccacgaggccattccacacctgggtcgagaatgcctctcttttggtaggtgcagtcttcacgtgggctttgtgtagctgccgcaaccagcgtccgtcctctggatccgtcgtcttgcgcaggaaacgcatcgacggtgggaggatggcgttaggtgatcgtaagctcttggcatctggcctggtgtggccatgtcgtgttgtgcagcgcagcaagaaggtgttccatgtccggatctgcgagcattcggacctgacgcgctggccatgcggacaaccagacatgctggttgtccgcatggtgagcttttgaccacccgtaggtacaattagtcgagcgcccgcctcaaagatacttttgatatgtacacttgttcatttcgttgttcgtccacgaccccgacctgcgtctatgctgcgctgctcgatactacacaaacacgcggcgtcgagagcgtcaagaggcacgccgcgtctggttggttggttggttgatgattcactttactggggccctttcgcctgggccatcgctctggtccgctgcgcgtggtcgttcaggtgcagctgcacctggttgatgagctccgtgaacgttgagcactcgaacgtgaggaagaagaaggtcagcacgtactcggtcacgctgatcatgccgaagagcagcacggcgacccacgaccagttggacacgacgatggacatcatgtgcgtcacgaacacggccagcgcggccacgaagaaggccacggcgcgccacagccgcgtgtgtcgggcgccgatggcctcgttgcggccgacgaacagcatgttctgcacctcctgcaggcacgcggcgtccgcggcggccttgtcctcctcgctctgcggcgcctccttctcgtcgcagtgcgcgcacgtcgtcgtggggcacgagcgctccgcggccctcgtcgcgttgggtgacaccacttcgtccgtggacacgacgtcgtagccgcgctcctgctgctcgcagacgtgcggcctgggctcgctgaagatgaactcggcccgcacgccgaagtggtctgacagcggcgtcttctctccgtgtgcatcggtgaagaagcccttgaagatgctgctcttcaccaggtgccagtccgacgcgcccttgggctgcttgtcgatcttgtacatgacgtagtccatgcgcatcgggtgctccccgtgcgagtacttgttgtcgggcgacgcgaacgtcaggccgtcctcggcgttcgtgtccgtgaaggcatctcgcaggttcagcagctggcgcggcaccttgagctccagacagtccggggacgagttgaagtctccgcacacgatcgtgagcttgttccggttggtggccgcgatgaactgcgtgagctcgtagctctggcccgtgcggtgccagaggtagaagtctccaggtccgggcttaccgccggcgttgtagttggccagcaggtgggtcacgtacacgtcgatctggccggcgggcgtctcgacgcgcagcaggccgacacccttgttggcgacgaagtcggactcgtgcagcgcgtagggccgcccactgaggctgaacgagtggtagagcgcgctggagatggggaacttggacagcaccagcagccccgtgccgaacgagtcggcccccatggggaacgggaagcccacggccgggttgaagtagtggtagtagtggaagccgctctgctgcgccttggcgatgacgaggttgcgctcgcgcaggtgccagatctcctgcagcaccacgagctcgtagtcgctcgagattgcgctggcgatctccgccgcgcgctccgtgcacttgggcgcgaccgggaggcctggtggaacggggtagaacgggcggggagaagcaccaacaaacaattgtcagtttctaacgtttctatcacttttttctgaactgatcgccgaaaaaaatgatcttaccccacgcgttgaggctcagcacgcgcagccgcacgctctgcttgtcctgctccgtccagaccggccaggccgcgcgcgagggcgcgggcgtggccacgggctccaggttgaaagcctccagcagcacgcgctggcggatccgctccacgacgtgctcctccgtcatcccgatagcgacttgcgactggcgacttgtgacccgaacacttgcgctccagtttattagtgtcgccttgataggatatgtgagaccacgtacgacctgagaatgttattccgagggaagggcaggggacgggcgacgtacggcctctgccgcccaatcagcgtgcggatcgccgggataacataatcttttgtgcggttgttggtcggcgttcgtttgttgcgtttgcgatggagcgaaggcggaagatgaaggatggatttccacccgtcgtgctctcggactgcaatatctacagcacagtacagtatagtacagtacagtatcgagtgcattaggcaggatattggcgttgtgtaggctggatgttggtggtcgatcgagaagacaggataggatcgtagggtaaaatgggggctctgggcggctcctgctgtcgggcgtttcgacaacatcgtaatacggtaggggttgaggagtcgagggttgcactctgtgtgtgtgctggtccatgtgaagaccttgtggcgtggtcgacgcttcggtgagtaagggttgccccgcgatgggtccttgcatagaaaagatcgagcggtttaacaggtttcgagccacttcaacttgaaatacatgcttgttttaacaactgaggcttcgagctgacgacactcttcgtactgtgtaagtcagtattcgcatcagagcaacttttgagtgctgcacaactgggtagtgccgaaactatgaggggtatttcaatgaaattccattcgagaagggggcatctcattagttttctagttaaaattcaaaatgtatgcagcaagcttggtggcgttactgcttgctgactatctcaatcgtagacgattttcactctgcgcactgtacgctcggtagcaaacaggaaagccctcgacaagatgaagtcatcaggggcgcgctccaaagaagcacgctcgattgaggtgaaacgatgaagtcctcgagtgttatttttctatttgttaaggctatattataatcttaattataaaataccttacaaaatagtttgaaaaattgcagcataaaaaaaagtaatgcactcagtttctattgtgtgcttcgaccactttcacctttcgcaccgcatgcttcacaaactcaaagatattggtggtcacgtgaacatcgggggcctgcagtcgaacgcgatccggttcgtctttcgcttgcttcttcataggtgactgcaatacgtcggcgtggaaaacactcaagaaggccaacttgcacgcgaccggtagctctccaaccccttcgagtttctgaagattgaaccgcatcaattcatctttaaacctgtcgagcactgctttgttcaccaccactgtcaagtagcacaatgctttattcctgcccagcatatgtgtcagtgtccccaatgctgcctgaggataagtcacatattggttctgcagctccaggtgacagacccaccaccgcagggtccttgccagcacgtttgattcattgttcaaaaccaccaccagagggccaatgttgtcgaaataacagtccagacgacaaagttgcgtgttgtactgttcgcacgctcggacaaagttgtacgcgctgacgagtaagcccttgcgcagagttaattcctgcagatgcggacaggactcgagaactccgggaatcccaacccctcccaacaaaggaaactcagactcaatccacagactgcacagatgctgcccaacaagattcagaaaggtcgtgaggtgttgcctgtgcgggccatctgagatgtgaagctccagtgccagaccgggttgcacttccgagtccctaacgtggtcacacattacgagattggtgcgttggacttggcacaagccaattccaggaatcaacacatccacccactctgtggaaacatcgtcgtcggggtttaccagcaccactccaccagcttcaccttgctgggaaatatttgccgagtcccacgaaaccacacgaccggatgcttcttcagtaacttggatagctgcattctcacgcaaatggtactcgcgcgcgtcacgagtagtgccgcttgcggtctccagtcccttagcaacggcgaatagcccctgctccgtattagtggcagttaggatccttgacatcgtatccagtatactaggatctagacgagcattgtagatgatcacttgcttcacagaagaccgcgatcgcgctcgggtcgagaaaaatgcgtaggcaatccacatccacactttcaccgtcgaaggcgagtcatgcgaagagagattaaatgtgaccgaccggcacgaacgcgtgactgccaaagccgagcaaagcgcgttcatttccactccactcttagcttgcaagctcacgcacgcatgacccaccccccgcgactcgatcgtgacattgggggaagtttccgcacagaatagttttgatatcatgcggcagacattttgagaatcccgatgacgcacgagacaaaagtttagcgctgaaaactggacctcccgacccattttagtgagcaatttcacgaaggcactactggtgcggttggaagtcaaagcgttcttcgaattgatgcagttgacgacaaatgcagcgtaaaataccgaccgacaccttcgtgtcacagtagaatggcggcccaaccttgacgaaaaccacccccatcggacttgatctggacgcaaagagttgtttatgacgtcccacacgcgctgagatgcaattcctgacgcgttcaagtactccggtttgccgataacgatttgaaccagaattaccaggctgcaagcgagtaaatatcgtttcgatttgcgcccaggcttcccggaacgcttcgctgctgttgtcttccttcagttggcagcaaagcgctacgagatcatcgtcagcccacgagaagtcgtcgcttggatcattgcacagctttcgagtcgcctcgatctcaacaaatacaggcatctccgccatcataaacttgtgccttcgtatgtcctcgttaacactgcatacacccttttcttttagcagcgatatgagcacctcgacgtcgatccacgccactgccgcgaatagagcgagtccctctcggagtgtctgaagctgctctccgcgttcagttgcagtcgactcactatctctcgggggcacgatgctgaactgcagagctgggtggtagtccggcccccaccgccacactgccgctgagctccccgtgcatgtagacgaaaacagggacttcatcactccgcaccattcgtccaggaacgaccacttctccaacatcattgcgcgcttgttgccaaaacgtgaatgccggaattggagtcaaaaggtttcgatagtccacttacttcagaaaattcctgaaatggtttgattgaaagacacatttgagactggcattaagatcgcgaacttctctagcgggatgacaacaccccccagcgcagtgatcgagcagtacgccaattttggcccacatgtgcagcttccagccaaccctacgttgttttaaaactcggaaagctctaccactgctcgcctacctctcgctctagaaggcaaagccaacggtctggtcagcattgtgaatggttgcgaaaacgtaatacagtacaatacatcagtgacaatatattttattgccagcatgcattttctcttcttcacagtcaatcaaaattcaaatgaaatataagcatttcgtactgcgtgctttttagctattattgaaatatatgttgcaataatcgaaaaatatataagccagttttaaatacaagtattttcgctgagggcgcgcgtggccaaactatgctgtcgctaggctacactgactaaaatgtgcacaattttttttgtgtcatttaatgataaaaggattgacaaacatttcccatccattcatccgcataccgtataatactacaataatataatgtacagttattattgggtaaaattagttataatatttttattaatttatataaaatacctcccaaatgtattgtaaaaagttgtgccgaatcatatcgccgctggcaggcaggcagtacagtactgtgcatgtgcatggtacttagtgtacatgtagtgccgccatgctcgacttgaaagcaaccgtcggcgcgaagttgacggcgtgaaaacgacgatcggtagaccggcggagggaatggctgcatttgagattggtagtggcccttttcttcatgctcgggatcacctacgtggcgtccgtggcacgccgcaaaccttgctgctgcaagaaggtgctcgtctgtctgtacgtcttgccctcacaacgtctcgtcagcgacctgtctccgtacgatccggtccaagtctcatttgagcttttcaaccaccgatcgcaccttactgcaccgcccaccggaatcgctactcgacatgaagtccgtctccgaactcttcggcgacaggaatgacgttgccgtcaccgctgcggccgcagtggccgtgagcttggggctgtcactgctgctccacagcaccaagaagagcaagaagcctgaaggtgtgcgtctgccgccgatgcccaagaccacgctccccattctcaagagtctgttcgacgctggcggcaacgtcgcgcgcttccacgactggctcaacgagcagtccatcgagttcgaccaccgtccgtggatgtactcgatccccggccgtcccgtgaccatcgtgctgacgtcgcccgataccattgaggatgctctttcaacgcagaacgacgtgttcctgcgcggacccgtgggccagtacatgagcgaagacatcttcggcaacggcatgatcattgcggacggcgacccgtggtattaccaccgcaagacgtcgagccacctcttctccatgcagatgatgaaggacgtcatggaggccaccgttcgtgagaagctcgaggtcttcctggatgtgctggacatctaccacaagcgcggccagtcgttcagcgccaagcaggagctcctccacttcaccatggacgtcatcgccaagatcggcttcggcctggagctggacacgctgaaggacggccctcaccgtgatgaggaccacgaattccaggaagccttcgaccaggctgctgtcgcgtacgccgtccgcgttcagtcaccgctgtggctctgggagatcaagagatacttcaacatcggctgggagaaggtcttccgcgataacaccacgatcctgcacaacttcatcgacgaggtgatcacgcagtccatgaagaagaaggcggagctggcggccaagggcgagaagatggtggccagagacctcatcacgctcttcatggagagcacgctccgcgagaatcaggacatgcacatcgaggacgacgacgccaccattatgcgagatatggtcatgaccatgatgtttgcgggccgagactcgacggcgcacagcatgtgctggttcatcgtccacatgaaccgctacccggagattttggagaagatccgtgatgaaatgaaggagaaattgcctggactcctcacgggtgagatcaaggtgcccacgcaggagcagctccgcgagctcgtgtacctggaagccgtcatgaaggagaacattcggttgatcccgtccacgggattcatcgcgcgcgaggccatgagggacaccacgttggtggacggcactttcgtcggcaagggtcagaccatcatggtctcgtcctactgcaacgcgcgcaacgctgacaactggggcgaagacgcgagcgagttcaagcccgagcgcatgatcgaccccaagacgggcaagctgcgcgtgctgtcccccttcgtgttcagcccgttcggctcgggccagcacgcctgcatgggtcagaagtttgctatgatgcagatgaagctgacgctggccacgctgtacagcaagtacgacatcaagaccgtcgaggacccgtggaagctcacgtatgagttttctctcacgattccggtcaagggcccgctggacattgaagtcacgcctctgagtcctctgatggcgtagataagtaagtagcaattttagagaagacgctttagaataggcagtggaaaatgccttttgtacgtcgtgaaaacgcaaatgcaccgcgctgctacagtaacaaaccaacaaatgaagcagggaaatgtctacagaaatcccatggctctgaagttcatgtacctggacgttgaagttttgttcgttagtacgcaaagtactaccgtagtagtattatatactactatattagtagtagtcagcgacgagcgtatggcgaccacatgcgtgtatttgacgacagttgcaaactgcagtacgagagcgattgagctttagaagatattgtattcgttggtgataccaaactgataatatatcagccgggtgtgctactgtaaatgaaaacctactactcggcgacaaataagaagaaaactcgttgatggagattgccaatctcagatttctgcagcaattgcggagtgcgtggtaagtgcgcccatgttgccaggatacgtgaactccgattgtaggaacttgaggatcgtggctcgcgcttgaaaacagcaacgtttagagtcgataagttctcacaacgagctcgaagaaactgcgcggttcctccattccttcatttgttttgggaatgtttcatcgtgttagccctgttgcgctctaattgttcatttgtcacgaagccgctaggtcgtccgtccattggagtgatgagttggtctgctcgtacttgtgcgcgagaagtataaatgacgaagtggattgaagtgaacgcaacacgagcgtcaaccaacttgatcggtcgacgtatggagatatcgacttaccactggcatcaacacttcggcacttagattttcatgtcttacttcggctcgagtggacgggcatcttacaagcactagtgctgtatttcacgctgtcgtttgggggagggggcgatacttgatgccaaagtaaattacccagtactcgtcggtgttcgtagcagtatcagcttcagcattccatcgactgggtcgcgagcacgagattaaagctaagttatccgagcttgtacccgcaacacatgcgaaggttgtggaggctatcccaacttgatcctacagtataaacgcgcgtgaactaagccgactcgttcatacacgactgtaccttggtgcacgcagtttagttcgacgccaggatttacttgcacacctgtacagttgctgtactgcagcaccgcacacaccgcaagagcccattcgccgtttaacattcgcctacacaagctgactccacgagaccttggcgttccagcttagcgctccttcgccagccatcttgtcttcacctccccgagcgttcgccgccggcgcgccgaccgatcgggaggctcggcggcagatcactcaatcggacgacccccagctgggcagacgagtcaaacaggtgaatcccgagctggtggaggagggcaacagtagctcaagcattgactgggacgctccagaaagcgcccaccctcgcacgtgcgaaggtgtcggcagcgtcgcaatggccagccagcaaccgctgcttcccctaatagcaccatatccaccctcggcagctccaccgagccgaagtctctctctcgctctctcttcttggtggagtcagcctctgcctctcagcgccgtccgatgctcttgacatgctcagcgcgccgtcaaatcgggcaggagacgacgcagaaacaatccagaccttgacttggctcatatggcggggcccgaaccttgccgcaagagcccaaagcccaagctctgctcgctcgcactcgaaaaagccccgcaccgcgacggagtgtttcgacctgaaatcaagtcccacacggcgcctgcgtctctttgcgtgcgaaacgaccgaccaaagcgacgccaaacccgaaccggagcccaaagccccaaagcttcaaagctcagccctcacctcaatcccctgtccgacatggcgctccgaccccgcacctccaagcgcgcgcgcccgcagacgtcccccaccgccgccaagttcgcgagcggcgacgagaatctgcagcagctgctgtacttccgccagcccaacgacaaccaacagctcgacgacccgcagccgcgccggaagcgcgccatggtctccgctaacctgcgcttcctcgagaagatgccccctctgcgcgactaccagcgcggccgcttcgggcgtcgcgggggcgtggacggcggcgacggagggggctcgctctggatgcgcgcgctggaagagtccatggaggagacgagcttcgtgacgagagaggctccaacctgcgccgcgttggtggcgcctgtgcccatagcagtcgacaacaggaggaacaaccagttcgtgccggtgcctgtagcggtgctgggcgcgggacgggtaggtggaggaatcccagcggcagcggcagcgtcgacgacgccgttcagtagaagtgcagacgaggacgccgtgcggagacgacggctcttcgccctgcaagcggcgcgaggcagcggcaaagacgacgaggcccggccagccacggaaggactctgcgagatgagcagattttgagcggagcgctatgctaggaatggactcggttcctctctctctccattgttttggcgtttgagtctctggtctggtctggagtagtctagctagaggagggaggagctggcgttcctcttcttgggtggacggtgactgctgctggacgtgtcctcgctggggctgccacaagcctcctgctctcctcctacctggctgctgttggtgtcgtccagttcgtcgcctaggatgcggtcccatttctcctcggcggacatggtgaacgtgtagcgcttggaaggcgccggcaggatgctacgacgctgttgctgcgagtggcgaggtggcaggctccacttcaagctgccgacgcagctggctgtggggctgggaggctgtcgctgaccgcagccgaaaggtgtcgggcgcacgagcagcttctggctgctggcctcggacacccgcgacgatggggatgaaggaggcggcgacggacacccgaacaggcgaggacgcttcgcttgcggcggtggagcgttctcttcatctgtgagacgatcgacgtcactgttggcggctgcagtgttgtggtgaactgcagtgctggtgaggctggaggagtcgaccttgcacagcacctcgccttcgaagcggctgcctttcccatcccgtctccgatgggcggggtttcgcacacgctggacgtggctgcgcaccggacggctctcgaagtccttgagagcgcgcgcgttgatgcttgaactaccgatcgatgcgggaggctcgtgcaacgctgccaacggcttgaagttctcgctcaccttcgggctccggaagttcacgatgtggtcggacgagcccaatacgctatcgaggtgcgtccaggacaagcgagacgaaggtcgaggcttttcgtaccggacacgcgacgtcgaagcttgtggtctagtcgagctggcgatggggtcttcttgtgacgaatcgtccgtgtagtgttgaggaggtatcgccataccactgctctctgaggacgtcgacgatcgagttttactcgactttggtcttggctttgaggctgcctggcgctcttcttccagcaacacggcagcggcagtatccttccatgcgtagctttcgtgtgtgactggatgaatctgacccaaagcgatggactctacgacgtcatcacggagctccacgttgcccaggaagtggaggcccttgtccacccgcggaagaatgcccttcgagacgtcgagagggctcaacattttcagcttctgatagattgtgtacacgcagaacaaacattagaaaaacaataaactctgtacagtatgcatccacaacaaacaatggacacgcaccgcattgcgaggatcaaatacaagctggtggcggtatgtgagaatggcagagtagtaatgctcctcgaagttgtcagggagcactgaccccttctgcttctgcagcgctgctaagacctacacagccaccatgtcagcaaattgacttgcagcattcatcgcttaagagtttttcatacctcaaccggggtcttgaactggcttacgagcttgtaggcattgataatgccgacaccgctgacggacgggcagtagtcgcacccagcaagaatgcagagctgaataaactgtccagacaaaacacaagtgatcaataccaggtaataaacacatcccacgtaaagctccaaaactcaacgcaccatttcttctgtccacccaacgaatgacagctcttcattggcgcccagacttctcctcttgagctcgctgccccatccatccggactcaacttaaagagcaccgtcttgactccgtacggaacgcagtccgagtcgtccgagatgaccacgtccacaatcttctgcctcgataaaaatgccagctgagcgtccgcctcatacggcgcaacgtagaatgtgatgttcatccgcctcagcaccgcgatgagcttcatgaccatctcattggtcaccgacacagccctggtgcaggccgagaagacggcgcggccatcccgatcgtcctccttctccttcagcagcttctcagccttgagcttccactccgctcgggacctagaacaccaaaaaccaaatagaactataagtgttatgtagctaaaatttagcaactacgtcagctcccaaacctgctacgagcagcattctcccgagctttagcaggcagtggagctccgtcgaacactaaaatgggcgtgatgtcgtgctcttgcagcagtttgatctgctggatgctgaagttcaggtacctgttacaggtgcagttgcagcttttagcgctaattcaagggtaaagttactaaaatggaggttaattcgttgcgcacgcatcggtcggtcgccccagcacgaggtccacggggcagctgtacgcgcccttgtagagccacccggaggcgtccacccccacggtcttgcccgcgtacttggacacgtgcacctggtccgtgacgctcttgagcaccggcagcagccccgtcacgcccatcgctaactcgtcccgcaacttcgagtttgaatctggcgccaaagtgacgacagggtttcaaccaatgaagcacatctgcgacgtgtggagaagcgaagttgaagtgcatgcaatttagccaatcacatgcatctgcgacgtgtgacgaggtgctgcttggacttgggcagcttgcatccgctcacttccgctttgaccgatctccagccactcagccatgccgcttacgctcgctcaagctcagcgcaactcgcgcagcctgtaccgccgcattctgcgtgagagccgtcaactagagcccaacacgcgcgagttctaccgccgattcgctagatcggtgcaggtgaccgaagagagcttgcatctgttctttacttgacttagcttcgtgttgttgctgctgctgtgcacagggattcccgagccacgcgggtgacacggacccggacgctatccaggaccacatccgccgcgtcgagcaggacatccactgcgtgctgctggaccgtggactgcactcttcgtagagacgcatccagagatgacggaccacttgcttgtatagaactcccaattgatgcatacatatcataccattttactcaccaatcgcaccaactaactcgatgcattcaccgtcggttgactagcgtcagactggctgcttgctgttgtaggagcagcagcgactgccttgggtcgcgcgtgcttcttggtcggcttgcccttcccggagcgctcgggccacttctcctcgcaaaacgaacgcgaggcgtctaagtacgccttccacgcctctcgtccctgggcgtcgtagattcggggaggcagctcgtcccgacgtagcgcgttcttgatgaccgcaatgttggcgttgaattcgcggtctaggatcaccgtatccttcgccagcagcggcatttcaggcgggtacgcgatggctccgacgaagaacacggccaccatcgggagctccgcgttctcgagcaacaaactgctgtcgtccatgatctgagagagtcgctgctgagcattcgagacttccaggtagtacgagtacgtcttggccagctgcttgagaagtgcgtcgactggcctgtcttctcctggtagctgggtctgggtcatcatgtccatcgtgtcgacgcctgctctaccagtggagacgccctccattgcgtccaaaaactcttggagccgactacgaagcactttgccgcgcgcgtagagcacaacgccgagcatgatatcaatcacgtcgtggtcttccttgcaggcgagcacccaggagcccacctccttcaacctcccgtaggcctcgttctcctgaagtagtgcaatgtagaatcgccagtacttgaggcggtagtagtcgtacttcatctggcgctggttgagctcctcgaacttcttcgcagacgggatgtactcggagaaccagatcgccacaatttgaggacgcctcttgtcaaagatcggggacatctccttcagcgcccgcgcagccgcatcagaaggaccctccaccttggtctcgttccgacgagccagtacagcgtcgaggagcgagttaacggggtcgtccttgtatccgctctgctcaagagctgagtagaacgttgataaccagtagaccagacgcgccagcacataccgggacggatggaagtagcgatcctcgtcgggaatcgactcaagcgcctctataatattcagcgccagccaaccccgtgctagagtgacgtttagctcgcggttgtcatcgtctctcttggcgtcggagagaagagtgagaatttcatcctttctggtagaactcgcactcttggagtcactggtggtcttcgagctcgcgttcttcttcgagtcttcagaagcggttgaagtgacggtttcctgactgatgctcttctcatctggctccttggtcgaagaagaatcaacactatcgtcgtcgtcattgttctctcgctcttcttcttcttcatcattctcctcctcttcattttcctcttcgtagaagtggtcgcacactaaccgcagtgcagccaccgacggcgactcgctgatagtgaggtctatccgcaaagcttgaagagaataaaacgcgtgaacgagagcgtgctctctgtcgccctcattgcgagccgcttcggccttggcaaaacagtccgccatttcagtcgcagttgctagcgcctctgggtccgatgagtcttgtcttcgaagctcgcaccatcttcgtttcttcagggttttaccgatcatgtattgcaggcggaagtgatcttcgtgtgcgtcttcattcgcctcacaaatcgctagccccttcttgaagtacacaagtgctttctccagtaatcgcgaatataccgtgagagggaacagtgcagcgttcagctccttcatcaaagagaactcctgcagcacattgtagagcagcagaccgctctcttcgttgcactcgatcagcttgttctgcaattcatccagctgctcgtcaaagtcatcgtctccttcgccctctgctcctccatcaccactgccacgcttctctttcaactttaacttgtgggttttagcggcctcctcagccagccgcgcagccatatcgaagcaccgtcgagcgaactcgatcacttgtacgatatacgtcgttgcgaactcctcgatggggatgcttggagcagattgattttggtcggtgttctcctttgtctcctccttcgaatccttggaattcgatgacttactagctgccttgtggccatcaaaatctttaccttgcgactccttcattttcttgaacaagctccaccccaaaacaaccttctggaacgacagcatatcgggaccttcgccctgctgatacgagctctcaacgaatattttagctgtgtaccatcgcaatgcttggatcctgagcttgcgtccgagcacagccgcgaacgcatcggttgccgcgtggtacagctccttcatcgtctttcccaaacgaatccacgagtcgatccggtccggatgatagtacagcacgtccttcatcaagaactccacgcgctctctcacatgttgctctatctccatcagctcgccaaggtttcctcgacgctttacccgcccaaggatgaagttcgcacccatcagataccacaagtgacctaagcaggcttcatctgccgaatttggcgctgtatcagcgcccagaaggaatgggagtgcgatttcttcctgcagtagaccccttggcgctaggtacgcctccaatggcggtgacacggacgctgggtgcgcagatagagcagcgaaatcagagtcggagagagcgtcacgtacagcatagagaagcttgagtcgctctttcttctggccattgttctttggcttcgtcgcaagaagaatcggtacagcgaagcgaatgagccgcagtgcgtcttcgtgcttgacactttgttctgcattctggagagaagcgaacgtagcccccgtcttgtgatcgtcggtgcccggcagaatttgcccatcatacagacaacggtagcactggcagacctccttctggaatcgatactccgcttcttccccgtcctcatcgtcttcctcgttatcctcttcggcgctgctgtcatcggacttcttgatagattttccttcgtcccgaacgctcgcgttttgcttcacaaacttgctcaacaacagcgtacacgactcgaggaagcacgaggttttgccagaatccgctgaaggccgcgattcagagaagtatgtcaagccacagatgccgtgctgcccgagtcgttcgtgcaagagatggatcaagtttaccaactgaggcagcgaggcaggcaggtccgggcgacggaaactctcgtacagcaacacgaacaagatggcaccgttgccaaagagttgtcgtggcgtcttgccatcgctgcgtgccacggtctcttcttcctccttcattagtgtgcagcataatgtcatcaacgctgatatcttcggaagaggaagcgacagcgcaagcttttcgttactctggagagctcgattcataaagcgaagaagctccacgagcaccactcggatgcgatcacgacgtggctgctttcgtttaactggatgaggcgccaacgtgaacaggttccggaactcttcgctggatagcgaccgaatagtgtacagcagtcgagccatagcatccacgccaatcatttggagcttgtcatcaccaccaacagagggctcgttgatctctagtgcagctcgtagcattgatagcacatcgctgggagaatcaaagcgtagcaatattgtcggcttcaggcatcttactgataatgcacgcagtaacaaccaataatcgctggtagttatccgttcacactggttttgcgtgagttgtgtcaacaagaagtccaacgcagcgagggcgttcgtacaagcttcatccggtgaatcgtcaatggtagcgggctctttcgtcaccaccaacccatccagaaaatcaataacgtaataaagtgtcgtcaacaggaacaataccgcgtcgccatccgaatactttgagctatgacgcagtgagtcgagcaccatttcgaaacgctttttgctgctcccaccgcgagcagctggatcatcttcgtcaacttcaaattcgtttaggaagtccatcatacggggcgcttgattagccggaaagaagtggcccaacaatacagatacaacctgatcgtgatctccagcttcaaacaggcgctgggcttctgagcatacatccgaaaaccgcagaccagagatcttctcgtccaagattcccagcgagatttcgttgtcagctttctgattcggcagctcaactcgaaaatcgtccgctccaccaacatcaccattactgtcatcaccattactgtcatccccgtcaatcagctcaataagcttgtccctgcattggctgaaatactgctgtgccatctggggattcccgcaacgctcgtacatccgcgcgataagccaaagcagacgtagaaattcactcccactgggacagtccgcagtctcctccgagccctcgagccagccgaactcaaacagaagcttttgagcccgagctagctgactttccacggcccttttcatctttcgccgccttttaccgcggacaggctgctgtagaagcatatcaaaatgaagctccagcagaaatagttgggccccaagtgctagaccatttccttcgaagcgactaccttggacgagcgagtgatcggcgacatcaataatgctagactgtgttgtggtcccccttggcgttctcgcaacatccagctcaccatttagtactttttccagccaggtgcaaactgtgtggatattttcatcctcactgccaagtttcaggtgtgcccatcggccgcattggttcaggtagtgccgcacccagtccattacgccacgaggtggtgcgtgtccgctgtcactgacaaatgctgagattcgggccccggacacaatttcaactcgcgaaggcgattctcctgatgatgttcggtcccttgacgatttttgagaagactgtgactccactgtagccgcagagtcttccgtagacgacgggaaggcaaacgacgatacttgtgcgactgtctccttgctcgcgttcgaaactcggaatttcgcgtcgactagctcaatattcagcggcggcagccactcgatggagacggactccggcgtcgactcccgctcctcctctccaattgcatccggaaggaaagctcctaacctgtacgccaggtccttctcccgcgccttcttgactgcagccgcgtgctcttcgcgtagacgttcctcgttacggcgcgactttcgtctgcgcggtgggaactccaataaatcgctcagctgaatgccgctgtcttgcgtatcgttatccgacacaccggtcgataccgacgtctccaacgctgcagacactttagccacatctttgtgcttcgcgcgcttggctggaggtggatggtcatcctcatcctgcttctccgcactaactgtctcctccttagcaccagcgtcaccgcgcttctcctccttctcctcctccttctgctcctccacgctcgccatctccacctgctcatagctgacttgaatctgcaccgccgcacgcagcacatccacaccgtcgtccctgttgccgtcctcgaaggcctccagcagcaccttccccagcgcgctccaggacggctgctgcagctcgtacgtcctgctctgcatcctgtgctttaactcctccgtcctctgctgctccagcaccttcctcctcttcgtttgctcctcagcaatgccatgcaaatggaccagccgcttgcgcgcgcgccgcagcagcttggcgtctttgtttgttcccttcgtctctgaattgggcccgtcaatgagccgcaccgaggcacacaacggatcgtgctcccggatatgcgccgccacgcgcgcgtacgcctcggcgtccccgatctcgtgcagcacctcggccagcgtgcgcgccagcggccagtacgtggcgtccaccttgagcccctcctccagcgcgcgccgcgccagccagagcttgcccgtctccacggccgcctggcccatctggaaccagaccacgacgtccgtcgcgtccagcgccagcgcgcgcgcgaagcagttaagagccgcctcaaacgcgcgcgcctccacctccatggacgccaggttcttgtggcacaggtactcgaggcgcgggctcacggccacggcgccgctcagcagctgctcgtatagttctctggctcgcgccgtctcgcgccgctgctggcagcgcagcgcctgctcgtacagcgccgcattgtccgcgtcctgggcctcctctgtggcgcgggcctgcgccgcgctagccctcgcgtcgcctgccgacacattaagcgccgcccaggacgccatgattgctttttgggcagactatggtgcaataaaatgctcatgaaatatgtaagacgggataataactcgaatgaacaattagaacaattaatattatattttcattcataatacacattattattattattggactattgtaggataaggataaatatcgtgacggtgccgacacaatttttttacttgatttaagtataggcagactgaccgcaatgcatgtatattgaccaatgacatctagatatacccaatatcggccaatgagcttgattaggtgtagggtaaaacgatgccgacgccgtgccgacgtataatgtaggcacgggggcgaaaatatgcagggcgtcaatacgagccaccagtctactgctcatcactcgaatatctgccttcttgccgacagaacactcggaaccagtatgagcctccaagacctcgcccccgtcaactcccagcgcgctctacaaaccgcaatcaacgccttcggacgcttcgtcgcggcccaaggcgtctccatggacttcatcgctgcctctctcgcagatgatgagagtggggttgtgtttgtgaagctcatggaccgctttggcgttcacctcgccttcgtcgaaggccgaggagggaagccgctggccaagaactcggtcatgagctactaccgccatgtaaagaactggctgctcgacacctacccgacccaccgacccaccatcgagaagaaactactcaagatgggacagacgctcgagcgccattgtctgaagcgcatcgaagatggaatggtcaagaaggcgcctgcctgcacgaaggaagacctacgaattctcatggacggactctactatgatgccaccagccccaaggactaccaagatgccgcgttactggcgctgatgtggtacgcgtttggccgcgcctcagacctggggttcgtggggaagggaaacctgtctgtgagtgcggatggcgttgtgttcgtccggctcatccgcgtgaagacttcagacgagcagggcatctctctctttcccgacaagaacagcttcatcacataccccctgcatgcgattgcgatggcactggtgatgcaggacgctccgtgcgcacagctgctggatcatccgcaccttgccgcaagcggcgacgagagtatgacagcccccgttgacgtgccactagttgaagctcttgttgcctatgagaacgacgacacgccaagtgagccgcctcagaaaaagcgtaaactgcctgaatacaacatgaagatccacgcctacgtgaaccgcgttgtcaagacagcgtctgccgctcaagctaaagcggtgccaactgcaaacttgacgtctcgctcgtttcgacgtggtggggctcagcatgcaaacggtgatccactgctcagtgctcagtggattttcgatcgtggttcgtggaacatgacggctaccaacaaggctttcgcttacgtgttcaacacaaccagtgaagaccagaaagtagcacgtggtctcagcgggtgggactcgagcaagaagccaccggttccaaccctctcctggttcgactccgccagccggcagcaggcactgagcttgggaaatcttcttttccagccaagcgtgtgcacccaagaccccgagaagaagctcaacgcccgcgtcgctgaagttctaactgccgcgctgatccagcattttcccgaggtactcgagcgctacccgatgtgcccgtacgctacccggatgcgcgaatgcctgatggcgttgggtttaccaaaagctcaagttctcgcgtggagctctgaactacaggcgaaggtggcacaaaaggatctggaggaatctcaagacgacgcggaggtattcacaagagaagaaaagctgatcaatcaccagaactgcatcatcggcgagctgatagccatgaatcgagccttgaccgagcgggtcacccaactggagagtcagcgcgacgttggtcagggtgactcctccacaagtttgcctggcaccacaatcgcattgcgaggattccgctactgtatcgaagtcgtgtggaagcaaggctctcccgaaaggcccagcggctatttggtttgagtggtacgcaaaaataccacgtacaagcacaccgtgaactacatgaagctcttcttaccaaacggcttcgcgctggacccgtcggcccctgactacacgaccaagttgttcgtacgggaattgatgccgaagccggtatgtacagttttttagaagagcatggagtcaagagcaaacgtggatcagctgtactcaagcaactgcgcaagtttttccgggaaagcaagcccaactctctagtagacgcgtgccgtgctcgcgttgctgtcgctggcgtaacggacccagcgcccaaggaaacgcaagagctgtttacacggaagtagttgagttatagtttctaacgtggggctataataaatgttctgcaccgctacacattacacttcgataaatgtatagcgtacagcatgtagcacgcgtttgactttcgtacgcaactgctggaacgccacagagcttcataatatcgatctactcttaatcagctcatgcatttgacaacatcttgcactgcagccgaggcggtgtgctatcactctgaatctttactgtagccattttaatagtaaaaaataagagtgttcctgtcttaaaggatattttatgattacccagaggttgcagattaaacaacggttttgtgtaaaagtaggattttattgttggtagttaatcggctcgaccgcgtaaacacagcccagatcagcaaagaagtggcgtaatccgtcttcggtacttggcttgtagacgagctcgtccgagtcgatgaagtagtgcttgttgcccaccgccgcgcgagcgatgcagtgccaggtaccctcttcttggccaaagggcctaccgatgatcacaaggtgcctaaaactagacctaggaatcttcttgaaccacctttgcgaactgcagttgaacgtgttggtactgttcaggtaccgcagctgatagcccatggcgcgaagcgcttcatgcagtgcttgcatagaatacgccccgtacttctcatcgccatgggggggctggcccttcttcctcgggtgcagccgcgttaagacgacgcacgattggcgccaaatcctcgacggttaaaaaaaccccgggtttgcaccgcattgttgatcgagtacaagccacagagagaatatctctcgaatgtaccgctctgattctcacacattggaccgcccctagcccgtctacccacaatggattgcatctctgttcgtggaaggtctagcaaatcgccggacgtgaagagagacgcgcaccaaaaaaaactccccactcttacttagcactgacgtgaaatcgctagcaaatcgccggcggggtgagcgcaaaagcaaaagtgagaaggactgcatcgctgcatcgaaggcgacgagcgctaaccaaccgtgtaaatttcaatgcttttaatacagtacagccagatgaactctcgaaaaatgagaaatgtattgcgtttttgtatgttacgcagcgctaatgctgctgttttaataacaacatgcaaacgcttaagttggtaatagcggcagaattgcaggtgtcaggcagtaacagcctgcaatccaggatttgctctggcactgctggagcagtggcgcatttgattgctaaccgcctgggcaccatgcccgatgtgcatgatgtgtctgcttttttttttttagccaatcccagcttgtaggcactctgtcggccgatgtcggcaccgtcatggtatggaagctttctcccaacttggcaatgccatgacagagaagcgcaaggaatgccaacttggcattccttgcgcttttctgtcatggcatctatccaatcaggacaagttcttcaatgaatttagccaatcacgatcgattcgtgtgtatcccaaccttttcccaattattttgggaatttatagtcttgctagaataatgtccaatacaaaagttaagtgtaaatgttgcattactcatatttgaccacaaattcccaatacaatcatgattgtatcgttggtggctatggatctcgacccggggagcttggctgctggactcgctcacgaagccgttcgcgtacgtgggtaccacgacacgcgaggaccagagtgtcggcaaagtcctcgctggttaccgagacccgcacctgccatgcgtcacgcccacgattgccagcttgagcgagcttcttcctgcgctcgagtacgcccagctgctaaccctgcgcggccagctcttcaagaacgtcagcggcttcacggacaccacgctcaacgtcgacgccttagtcctggatgcggcgctcgcgtccctgctcatccatcttgacgacgtcgcaacgacagtccagcaggagcaggctgccataggcttcacatcgcattacctgtaccgcttccacgaatctctggacgcaacaacgtagcgctgggagctcggctctcgctggacacgtgcattggttggggtcggcagcttcgcacggcttggcaaacggagaacttcgggcagctgggtgaacgcagcaatggaaaccagggctcgcaaacggtgctgaccgggtacccgtacccacccgtgtagccgtccaagccgaagtcgggtacccgtacccgtacccgtacccgcccgcccacaagccacgggtgtacccgggccagccagggcacaaggttttgtacggacggaccaactgttacatctcccgacacggttttaaagttaaacatttaagtaggaactacgcgaaatcaatacagagtgaaaaggacttgtggaggctaaaagaagacggcgtaggagcatgatatagctggtataagtaagaaatattactatttagtactattttcgtcgacttcgggtacccgtggcaccgcccgaggtttgcttcgggtatccgtacccgacccgaaaccgggtatacccgaggcgggtagggcgggtacaagtaaagggtacccgattgcgttccattggaaacaccaccatacttgccgcagccgtcacccagatgctatcgcccatcgcagcaatgcagcacacacttcagaagctcgtcgcggtccacgagagcaagtccgccagcgctgacggtcctgctccttgtcgctgtgctggccaggccccgcaggcgagcactgacaccgtcgttgaagcgcactctcttgctggcggcttctacaaactggtacacactggagctgtggcacacggcaacccaaaagaaaccacagtttgttcgtgctgacctcaaggcaggcgtcaacatcatgaccatagcagcagggcgagaggtagacgtaccaacggcgccactggaccgggacggcgtcgcgtatcagctgtggaagcagcgtgtctggacgctagcggaagacttggacaagaaggtcaacgcagcgcttgggagtatcgacggtaaaggccgatccaaaaccgcggggtcgctacggaagcgctggagaaagctgcgcgttgaccaccgctctgcgtacgacgcgctccgctcagcatttatcacccgcaaatcgaacggtggcatcgtcgaccgctgcacaccagctagtcaccaatggaagcaaaaagacttggagtcgtaggatcacgcagcttgaattaacacttaatacattcctattaaacacagcgcatggattcccgtcagtcccgatacaaagtcatacacaatagaaaaacgctcacataccgtcagcgagcgcgcacgacctcgtggttggccgacagctacaaaaccggcagcataacgcccgccctacctggttttgtagctgctttcggcgggtcctagcgtggggcgcgcctgggggcactcgggtctggggtggccggcgggggcggcgtgcggcacgctcggagtgcgctgttgtgttggagatggggggcggaaagtgtgaaggcggagaaggctgcgcagccggccaaaaataaaaccttaaggttttttcttggctttggagccgataaaccagtccatactttgttgaagtcatttggaatttcacttatgattggctctcctcattgggagcggcgtttgggacctggtcgattactggtcgcaaacacgatcatgagattgtaactagaggtttattgtgctttgcaatgattttggcaatatgaggcgagatttgctgtatttatagcgaccacctgctagatttacgataaatcgaggtgcataaatgggtggaggcctagaattacgctaaaagcgccacaattgcacttttgaaagtgcaattgtgggtgtgcagctgcaattctgtcggtttttatccacaaacacctacacacacggcaattatgcataagaggatggatgtgctggggatcatggacggtggtgtacgggaccaatgcatggctgcttacatgccctcccaagtcgatatatatatgaggaggtggatttatgcataattttagccggtcgtgtatcttctttcacacacatttaggagcaggctttgccatatttagagtctaaaatggtcggcaaaataactgcaaagcacaatacgacatgcataattgccccgccagtcttgccaccaccaccaaacaagtcgtctacatgtacgcctcaacaattccagttcacttcactttttaccgcatcaactttaagccattctcaaccatgaagcctgcacacttaggcgcattcgccgcggcggtctcaaacgtggcgctcggctactcgttctccggcgtgtcaccgccgttgccagcttctatttccagtccggtgacggcattgatgtcgctatgtcggctgacgaagagaaccgcatcttcggcggcgagaaggccaagatcgacaagtttccctgcatggctggactgcgcaataacgggacggatggcgagggcttttgcggcggggtgctcgtagcgccacagtacgtcatcacggctgcgcattgcatgggggggcatggtcgatgtgaacgtcttccaacgcagcgtattcagggtcgaggatctcgggaggctgagcatatccgagttgtcgaggccttttgccacccgccctacaactcaacctggcccaaatgacgtgtgccccgaaggtttccgttgaagccccgtagcgctgcgaaggccacatagacaggacccagaataccattcaccatgcaatcattcaaatataaccaaagttcggaactgtggtcgccgtgacctcaataggcggctacgcggtggaggaccgtgacgcaaaaagagctgtatttgaaaacctacgataggaatcgcacacagtgcaaacggccatttggaatccgacgcggacacgcttgcggagcttgattctgtgagtgcacgcgtacaacagacgccgccaaagctccgaactgtggtcgccgtgacctcaataggcggctacgcggtggaggaccgtgacgcaaaaagagctgtatttgaaaacctacgataggaatcgcacacagtgcaaacggccatttggaatccgacgcggacacgcttgcggagcttgattctgtgagtgcacgcgtacaacagacgccgccaaagctccgaactgtggtcgccgtgacctcaataggcggctacgcggtggaggaccgtgacgcaaaaagagctgtatttgaaaacctacgataggaatcgcacacagtgcaaacggccatttggaatccgacgcggacacgcttgcggagcttgattctgtgagtgcacgcgtacaacagacgccgccaaagatccgaactgtggtcgccgtgacctcaataggcggctacgcggtggaggaccgtgacgcaaaaagagctgtatttgaaaacctacgataggaatcgcacacagtgcaaacggccatttggaatccgacgcggacacgcttgcggagcttgattctgtgagtgcacgcgtacaacagacgccgccaaagctccgaactgtggtcgccgtgacctcaataggcggctacgcggtggaggaccgtgacgcaaaaagagctgtatttgaaaacctacgataggaatcgcacacagtgcaaacggccatttggaatccgacgcggacacgcttgcggagcttgattctgtgagtgcacgcgtacaacagacgccgccaaagctccgaactgtggtcgccgtgacctcaataggcggctacgcggtggaggaccgtgacgcaaaaagagctgtatttgaaaacctacgataggaatcgcacacagtgcaaacggccatttggaatccgacgcggacacgcttgcggagcttgattctgtgactgcacgcgtacaacagacgccgccaaagctccgaactgtggtcgccgtgacctcaataggcggctacgcggtggaggaccgtgacgcaaaaagagctgtatttgaaaacctacgataggaatcgcacacagtgcaaacggccatttggaatccgacgcggacacgcttgcggagcttgattctgtgagtgcacgcgtacaacagacgccgccaaagctccgaactgtggtcgccgtgacctcaataggcggctacgcggtggaggaccgtgacgcaaaaagagctgtatttgaaaacctacgataggaatcgcacacagtgcaaacggccatttggaatccgacgcggacacgcttgcggagcttgattctgtgggtgcacgcgtacaacagacgccgccaaagctccgaactgtggtcgccgtgacctcaataggcggctacgcggtggaggaccgtgacgcaaaaagagctgtatttgaaaacctacgataggaatcgcacacagtgcaaacggccatttggaatccgacgcggacacgcttgcggagcttgattctgtgagtgcacgcgtacaacagacgccgccaaagctccgaactgtggtcgccgtgacctcaataggcggctacgcggtggaggaccgtgacgcaaaaagagctgtatttgaaaacctacgataggaatcgcacacagtgcaaacggccatttggaatccgacgcggacacgcttgcggagcttgattctgtgactgcacgcgtacaacagacgccgccaaagctccgaactgtggtcgccgtgacctcaataggcggctacgcggtggaggaccgtgacgcaaaaagagctgtatttgaaaacctacgataggaatcgcacacagtgcaaacggccatttggaatccgacgcggacacgcttgcggagcttgattctgtgagtgcacacgtacaacagacgccgccaaagctccgaactgtggtcgccgtgacctcaataggcggctacgcggtggaggaccgtgacgcaaaaagagctgtatttgaaaacctacgataggaatcgcacacagtgcaaacggccatttggaatccgacgcggacacgcttgcggagcttgattctgtgggtgcacgcgtacaacagacgccgccaaagatccgaactgtggtcgccgtgacctcaataggcggctacgcggtggaggaccgtgacgcaaaaagagctgtatttgaaaacctacgataggaatcgcacacagtgcaaacggccatttggaatccgacgcggacacgcttgcggagcttgattctgtgactgcacgcgtacaacagacgccgccaaagctccgaactgtggtcaccgtgacctcaataggcggctacgcggtggaggaccgtgacgcaaaaagagctgtatttgaaaacctactacgataggaatcgcacacagtgcaaacggccatttggaatccgacgcggacacgcttgcggagcttgattctgtgagtgcacgcgtacaacagacgccgccaaagctccgaactgtggtcgccgtgacctcaataggcggctacgcggtggaggaccgtgacgcaaaaagagctgtatttgaaaacctacgataggaatcgcacacagtgcaaacggccatttggaatccgacgcggacacgcttgcggagcttgattctgtgagtgcacgcgtacaacagacgccgccaaagctccgaactgtggtcgccgtgacctcaataggcggctacgcggtggaggaccgtgacgcaaaaagagctgtatttgaaaacctacgataggaatcgcacacagtgcaaacggccatttggaatccgacgcggacacgcttgcggagcttgattctgtgactgcacgcgtacaacagacgccgccaaagctccgaactgtggtcaccgtgacctcaataggcggctacgcggtggaggaccgtgacgcaaaaagagctgtatttgaaaacctactacgataggaatcgcacacagtgcaaacggccatttggaatccgacgcggacacgcttgcggagcttgattctgtgagtgcacgcgtacaacagacgccgccaaagctccgaactgtggtcgccgtgacctcaataggcggctacgcggtggaggaccgtgacgcaaaaagagctgtatttgaaaacctacgataggaatcgcacacagtgcaaacggccatttggaatccgacgcggacacgcttgcggagcttgattctgtgagtgcacgcgtacaacagacgccgccaaagctccgaactgtggtcgccgtgacctcaataggcggctacgcggtggaggaccgtgacgcaaaaagagctgtatttgaaaacctacgataggaatcgcacacagtgcaaacggccatttggaatccgacgcggacacgcttgcggagcttgattctgtgactgcacgcgtacaacagacgccgccaaagctccgaactgtggtcaccgtgacctcaataggcggctacgcggtggaggaccgtgacgcaaaaagagctgtatttgaaaacctactacgataggaatcgcacacagtgcaaacggccatttggaatccgacgcggacacgcttgcggagcttgattctgtgagtgcacgcgtacaacagacgccgccaaagctccgaactgtggtcgccgtgacctcaataggcggctacgcggtggaggaccgtgacgcaaaaagagctgtatttgaaaacctacgataggaatcgcacacagtgcaaacggccatttggaatccgacgcggacacgcttgcggagcttgattctgtgggtgcacgcgtacaacagacgccgccaaagatccgaactggtcaccgtgacctcaataggcggctacgcggtggaggaccgtgacgcaaaaagagctgtatttgaaaacctactacgataggaatcgcacacagtgcaaacggccatttggaatccgacgcggacacgcttgcggagcttgattctgtgagtgcacgcgtacaacagacgccgccaaagctccgaactgtggtcgccgtgacctcaataggcggctacgcggtggaggaccgtgacgcaaaaagagctgtatttgaaaacctacgataggaatcgcacacagtgcaaacggccatttggaatccgacgcggacacgcttgcggagcttgattctgtgactgcacgcgtacaacagacgccgccaaagctccgaactgtggtcaccgtgacctcaataggcggctacgcggtggaggaccgtgacgcaaaaagagctgtatttgaaaacctactacgataggaatcgcacacagtgcaaacggccatttggaatccgacgcggacacgcttgcggagcttgattctgtgagtgcacgcgtacaacagacgccgccaaagctccgaactgtggtcgccgtgacctcaataggcggctacgcggtggaggaccgtgacgcaaaaagagctgtatttgaaaacctacgataggaatcgcacacagtgcaaacggccatttggaatccgacgcggacacgcttgcggagcttgattctgtgactgcacgcgtacaacagacgccgccaaagctccgaactgtggtcaccgtgacctcaataggcggctacgcggtggaggaccgtgacgcaaaaagagctgtatttgaaaacctacgataggaatcgcacacagtgcaaacggccatttggaatccgacgcggacacgcttgcggagcttgattccgtgtgtgcacgcgtacaacagacgccgccaaagctccgaactgtggtcgccgtgacctcaataggcggctacgcggtggaggaccgtgacgcaaaaagagctgtatttgaaaacctacgataggaatcgcacacagtgcaaacggccatttggaatccgacgcggacacgcttgcggagcttgattctgtgagtgcacgcgtacaacagacgccgccaaagatccgaactgtggtcgccgtgacctcaataggcggctacgcggtggaggaccgtgacgcaaaaaagagctgtatttgaaaacctacgataggaatcgcacacagtgcaaacggccatttggaatccgacgcggacacgcttgcggagcttgattccgtgtgtgcacgcgtacaacagacgccgccaaagatccgaactgtggtcgccgtgacctcaataggcggctacgcggtggaggaccgtgacgcaaaaaagagctgtatttgaaaacctactacgataggaatcgcacacagtgcaaacggccatttggaatccgacgcggacacgcttgcggagcttgattctgtgggtgcacgcgtacaacagacgccgccaaagatccgaactgtggtcgccgtgacctcaataggcggctacgcggtggaggaccgtgacgcaaaaagagctgtatttgaaaacctacgataggaatcgcacacagtgcaaacggccatttggaatccgacgcggacacgcttgcggagcttgattctgtgggtgcacgcgtacaacagacgccgccaaagctccgaactgtggtcgccgtgacctcaataggcggctacgcgatggaggaccgagacgcaaaaagagctgtatttgaaaacctacgataggaatcgcacacagtgcaaacggccatttggaatccgacgcggacacgcttgcggagcttgattctgtgactgcacgcgtacaacagacgccgccaaagctccgaactgtggtcaccgtgacctcaataggcggctacgcggtggaggaccgtgacgcaaaaagagctgtatttgaaaacctactacgataggaatcgcacacagtgcaaacggccatttggaatccgacgcggacacgcttgcggagcttgattctgtgagtgcacgcgtacaacagacgccgccaaagctccgaactgtggtcgccgtgacctcaataggcggctacgcggtggaggaccgtgacgcaaaaagagctgtatttgaaaacctacgataggaatcgcacacagtgcaaacggccatttggaatccgacgcggacacgcttgcggagcttgattctgtgagtgcacgcgtacaacagacgccgccaaagctccgaactgtggtcgccgtgacctcaataggcggctacgcggtggaggaccgtgacgcaaaaagagctgtatttgaaaacctacgataggaatcgcacacagtgcaaacggccatttggaatccgacgcggacacgcttgcggagcttgattctgtgactgcacgcgtacaacagacgccgccaaagctccgaactgtggtcaccgtgacctcaataggcggctacgcggtggaggaccgtgacgcaaaaagagctgtatttgaaaacctacgataggaatcgcacacagtgcaaacggccatttggaatccgacgcggacacgcttgcggagcttgattctgtgactgcacgcgtacaacagacgccgccaaagctccgaactgtggtcgccgtgacctcaataggcggctacgcggtggaggaccgtgacgcaaaaagagctgtatttgaaaacctacgataggaatcgcacacagtgcaaacggccatttggaatccgacgcggacacgcttgcggagcttgattctgtgagtgcacgcgtacaacagacgccgccaaagctccgaactgtggtcgccgtgacctcaataggcggctacgcggtggaggaccgtgacgcaaaaagagctgtatttgaaaacctacgataggaatcgcacacagtgcaaacggccatttggaatccgacgcggacacgcttgcggagcttgattccgtgtgtgcacgcgtacaacagacgccgccaaagctccgaactgtggtcgccgtgacctcaataggcggctacgcggtggaggaccgtgacgcaaaaagagctgtatttgaaaacctacgataggaatcgcacacagtgcaaacggccatttggaatccgacgcggacacgcttgcggagcttgattctgtgactgcacgcgtacaacagacgccgccaaagctccgaactgtggtcaccgtgacctcaataggcggctacgcggtggaggaccgtgacgcaaaaagagctgtatttgaaaacctacgataggaatcgcacacagtgcaaacggccatttggaatccgacgcggacacgcttgcggagcttgattctgtgactgcacgcgtacaacagacgccgccaaagctccgaactgtggtcaccgtgacctcaataggcggctacgcggtggaggaccgtgacgcaaaaagagctgtatttgaaaacctactacgataggaatcgcacacagtgcaaacggccatttggaatccgacgcggacacgcttgcggagcttgattctgtgagtgcacacgtacaacagacgccgccaaagctccgaactgtggtcgccgtgacctcaataggcggctacgcggtggaggaccgtgacgcaaaaagagctgtatttgaaaacctacgataggaatcgcacacagtgcaaacggccatttggaatccgacgcggacacgcttgcggagcttgattctgtgggtgcacgcgtacaacagacgccgccaaagctccgaactgtggtcgccgtgacctcaataggcggctacgcggtggaggaccgtgacgcaaaaagagctgtatttgaaaacctacgataggaatcgcacacagtgcaaacggccatttggaatccgacgcggacacgcttgcggagcttgattctgtgactgcacgcgtacaacagacgccgccaaagctccgaactgtggtcaccgtgacctcaataggcggctacgcggtggaggaccgtgacgcaaaaagagctgtatttgaaaacctacgataggaatcgcacacagtgcaaacggccatttggaatccgacgcggacacgcttgcggagcttgattctgtgggtgcacgcgtacaacagacgccgccaaagctccgaactgtggtcgccgtgacctcaataggcggctacgcgatggaggaccgagacgcaaaaagagctgtatttgaaaacctacgataggaatcgcacacagtgcaaacggccatttggaatccgacgcggacacgcttgcggagcttgattctgtgactgcacgcgtacaacagacgccgccaaagctccgaactgtggtcaccgtgacctcaataggcggctacgcggtggaggaccgtgacgcaaaaagagctgtatttgaaaacctactacgataggaatcgcacacagtgcaaacggccatttggaatccgacgcggacacgcttgcggagcttgattctgtgagtgcacgcgtacaacagacgccgccaaagctccgaactgtggtcgccgtgacctcaataggcggctacgcggtggaggaccgtgacgcaaaaagagctgtatttgaaaacctacgataggaatcgcacacagtgcaaacggccatttggaatccgacgcggacacgcttgcggagcttgattctgtgggtgcacgcgtacaacagacgccgccaaagctccgaactgtggtcgccgtgacctcaataggcggctacgcggtggaggaccgtgacgcaaaaagagctgtatttgaaaacctacgataggaatcgcacacagtgcaaacggccatttggaatccgacgcggacacgcttgcggagcttgattctgtgagtgcacgcgtacaacagacgccgccaaagctccgaactgtggtcgccgtgacctcaataggcggctacgcggtggaggaccgtgacgcaaaaagagctgtatttgaaaacctacgataggaatcgcacacagtgcaaacggccatttggaatccgacgcggacacgcttgcggagcttgattctgtgactgcacgcgtacaacagacgccgccaaagctccgaactgtggtcaccgtgacctcaataggcggctacgcggtggaggaccgtgacgcaaaaagagctgtatttgaaaacctacgataggaatcgcacacagtgcaaacggccatttggaatccgacgcggacacgcttgcggagcttgattctgtgggtgcacgcgtacaacagacgccgccaaagctccgaactgtggtcgccgtgacctcaataggcggctacgcggtggaggaccgtgacgcaaaaagagctgtatttgaaaacctacgataggaatcgcacacagtgcaaacggccatttggaatccgacgcggacacgcttgcggagcttgattctgtgagtgcacgcgtacaacagacgccgccaaagctccgaactgtggtcgccgtgacctcaataggcggctacgcggtggaggaccgtgacgcaaaaagagctgtatttgaaaacctacgataggaatcgcacacagtgcaaacggccatttggaatccgacgcggacacgcttgcggagcttgattctgtgagtgcacgcgtacaacagacgccgccaaagctccgaactgtggtcgccgtgacctcaataggcggctacgcggtggaggaccgtgacgcaaaaagagctgtatttgaaaacctacgataggaatcgcacacagtgcaaacggccatttggaatccgacgcggacacgcttgcggagcttgattctgtgggtgcacgcgtacaacagacgccgccaaagctccgaactgtggtcgccgtgacctcaataggcggctacgcgatggaggaccgagacgcaaaaagagctgtatttgaaaacctacgataggaatcgcacacagtgcaaacggccatttggaatccgacgcggacacgcttgcggagcttgattctgtgactgcacgcgtacaacagacgccgccaaagctccgaactgtggtcaccgtgacctcaataggcggctacgcggtggaggaccgtgacgcaaaaagagctgtatttgaaaacctactacgataggaatcgcacacagtgcaaacggccatttggaatccgacgcggacacgcttgcggagcttgattctgtgagtgcacgcgtacaacagacgccgccaaagctccgaactgtggtcgccgtgacctcaataggcggctacgcgatggaggaccgagacgcaaaaagagctgtatttgaaaacctacgataggaatcgcacacagtgcaaacggccatttggaatccgacgcggacacgcttgcggagcttgattctgtgactgcacgcgtacaacagacgccgccaaagctccgaactgtggtcaccgtgacctcaataggcggctacgcggtggaggaccgtgacgcaaaaagagctgtatttgaaaacctactacgataggaatcgcacacagtgcaaacggccatttggaatccgacgcggacacgcttgcggagcttgattctgtgagtgcacgcgtacaacagacgccgccaaagctccgaactgtggtcgccgtgacctcaataggcggctacgcggtggaggaccgtgacgcaaaaagagctgtatttgaaaacctacgataggaatcgcacacagtgcaaacggccatttggaatccgacgcggacacgcttgcggagcttgattctgtgggtgcacgcgtacaacagacgccgccaaagctccgaactgtggtcgccgtgacctcaataggcggctacgcgatggaggaccgagacgcaaaaagagctgtatttgaaaacctacgataggaatcgcacacagtgcaaacggccatttggaatccgacgcggacacgcttgcggagcttgattctgtgactgcacgcgtacaacagacgccgccaaagctccgaactgtggtcgccgtgacctcaataggcggctacgcggtggaggaccgtgacgcaaaaagagctgtatttgaaaacctacgataggaatcgcacacagtgcaaacggccatttggaatccgacgcggacacgcttgcggagcttgattctgtgggtgcacgcgtacaacagacgccgccaaagctccgaactgtggtcgccgtgacctcaataggcggctacgcgatggaggaccgagacgcaaaaagagctgtatttgaaaacctacgataggaatcgcacacagtgcaaacggccatttggaatccgacgcggacacgcttgcggagcttgattctgtgactgcacgcgtacaacagacgccgccaaagctccgaactgtggtcaccgtgacctcaataggcggctacgcggtggaggaccgtgacgcaaaaagagctgtatttgaaaacctactacgataggaatcgcacacagtgcaaacggccatttggaatccgacgcggacacgcttgcggagcttgattctgtgagtgcacgcgtacaacagacgccgccaaagctccgaactgtggtcgccgtgacctcaataggcggctacgcggtggaggaccgtgacgcaaaaagagctgtatttgaaaacctacaataggaatcgcacacagtgcaaacggccatttggaatccgacgcggacacgcttgcggagcttgattctgtgactgcacgcgtacaacagacgccgccaaagctccgaactgtggtcaccgtgacctcaataggcggctacgcggtggaggaccgtgacgcaaaaagagctgtatttgaaaacctactacgataggaatcgcacacagtgcaaacggccatttggaatccgacgcggacacgcttgcggagcttgattctgtgagtgcacgcgtacaacagacgccgccaaagctccgaactgtggtcgccgtgacctcaataggcggctacgcggtggaggaccgtgacgcaaaaagagctgtatttgaaaacctacgataggaatcgcacacagtgcaaacggccatttggaatccgacgcggacacgcttgcggagcttgattctgtgagtgcacgcgtacaacagacgccgccaaagctccgaactgtggtcgccgtgacctcaataggcggctacgcggtggaggaccgtgacgcaaaaagagctgtatttgaaaacctacgataggaatcgcacacagtgcaaacggccatttggaatccgacgcggacacgcttgcggagcttgattctgtgagtgcacgcgtacaacagacgccgccaaagctccgaactgtggtcgccgtgacctcaataggcggctacgcggtggaggaccgtgacgcaaaaagagctgtatttgaaaacctacgataggaatcgcacacagtgcaaacggccatttggaatccgacgcggacacgcttgcggagcttgattctgtgggtgcacgcgtacaacagacgccgccaaagatccgaactgtggtcaccgtgacctcaataggcggctacgcggtggaggaccgtgacgcaaaaagagctgtatttgaaaacctactacgataggaatcgcacacagtgcaaacggccatttggaatccgacgcggacacgcttgcggagcttgattctgtgggtgcacgcgtacaacagacgccgccaaagctccgaactgtggtcgccgtgacctcaataggtggctacgcgatggaggaccgagacgcaaaaagagctgtatttgaaaacctacgataggaatcgcacacagtgcaaacggccatttggaatccgacgcggacacgcttgcggagcttgattctgtgggtgcacgcgtacaacagacgccgccaaagatccgaactggtcaccgtgacctcaataggcggctacgcggtggaggaccgtgacgcaaaaagagctgtatttgaaaacctactacgataggaatcgcacacagtgcaaacggccatttggaatccgacgcggacacgcttgcggagcttgattctgtgagtgcacgcgtacaacagacgccgccaaagctccgaactgtggtcgccgtgacctcaataggcggctacgcggtggaggaccgtgacgcaaaaagagctgtatttgaaaacctacaataggaatcgcacacagtgcaaacggccatttggaatccgacgcggacacgcttgcggagcttgattctgtgactgcacgcgtacaacagacgccgccaaagctccgaactgtggtcaccgtgacctcaataggcggctacgcggtggaggaccgtgacgcaaaaagagctgtatttgaaaacctacaataggaatcgcacacagtgcaaacggccatttggaatccgacgcggacacgcttgcggagcttgattctgtgagtgcacgcgtacaacagacgccgccaaagctccgaactgtggtcgccgtgacctcaataggcggctacgcggtggaggaccgtgacgcaaaaagagctgtatttgaaaacctacaataggaatcgcacacagtgcaaacggccatttggaatccgacgcggacacgcttgcggagcttgattctgtgggtgcacgcgtacaacagacgccgccaaagctccgaactgtggtcgccgtgacctcaataggcggctacgcggtggaggaccgtgacgcaaaaagagctgtatttgaaaacctacgataggaatcgcacacagtgcaaacggccatttggaatccgacgcggacacgcttgcggagcttgattctgtgagtgcacgcgtacaacagacgccgccaaagctccgaactgtggtcgccgtgacctcaataggcggctacgcggtggaggaccgtgacgcaaaaagagctgtatttgaaaacctacgataggaatcgcacacagtgcaaacggccatttggaatccgacgcggacacgcttgcggagcttgattctgtgggtgcacgcgtacaacagacgccgccaaagctccgaactgtggtcgccgtgacctcaataggcggctacgcggtggaggaccgtgacgcaaaaagagctgtatttgaaaacctacgataggaatcgcacacagtgcaaacggccatttggaatccgacgcggacacgcttgcggagcttgattctgtgagtgcacgcgtacaacagacgccgccaaagctccgaactgtggtcgccgtgacctcaataggcggctacgcggtggaggaccgtgacgcaaaaagagctgtatttgaaaacctacgataggaatcgcacacagtgcaaacggccatttggaatccgacgcggacacgcttgcggagcttgattctgtgagtgcacgcgtacaacagacgccgccaaagctccgaactgtggtcgccgtgacctcaataggcggctacgcggtggaggaccgtgacgcaaaaagagctgtatttgaaaacctacgataggaatcgcacacagtgcaaacggccatttggaatccgacgcggacacgcttgcggagcttgattctgtgagtgcacgcgtacaacagacgccgccaaagctccgaactgtggtcgccgtgacctcaataggcggctacgcggtggaggaccgtgacgcaaaaagagctgtatttgaaaacctacgataggaatcgcacacagtgcaaacggccatttggaatccgacgcggacacgcttgcggagcttgattctgtgagtgcacgcgtacaacagacgccgccaaagctccgaactgtggtcgccgtgacctcaataggcggctacgcggtggaggaccgtgacgcaaaaagagctgtatttgaaaacctacgataggaatcgcacacagtgcaaacggccatttggaatccgacgcggacacgcttgcggagcttgattctgtgagtgcacgcgtacaacagacgccgccaaagctccgaactgtggtcgccgtgacctcaataggcggctacgcggtggaggaccgtgacgcaaaaagagctgtatttgaaaacctacgataggaatcgcacacagtgcaaacggccatttggaatccgacgcggacacgcttgcggagcttgattctgtgactgcacgcgtacaacagacgccgccaaagctccgaactgtggtcgccgtgacctcaataggcggctacgcggtggaggaccgtgacgcaaaaagacctgtatttgaaaacctacgataggaatcgcacacagtgcaaacggccatttggaatccgacgcggacacgcttgcggagcttgattctgtgactgcacgcgtacaacagacgccgccaaagctccgaactgtggtcgccgtgacctcaataggcggctacgcggtggaggaccgtgacgcaaaaagagctgtatttgaaaacctacgataggaatcgcacacagtgcaaacggccatttggaatccgacgcggacacgcttgcggagcttgattctgtgagtgcacgcgtacaacagacgccgccaaagctccgaactgtggtcgccgtgacctcaataggcggctacgcggtggaggaccgtgacgcaaaaagagctgtatttgaaaacctacgataggaatcgcacacagtgcaaacggccatttggaatccgacgcggacacgcttgcggagcttgattctgtcagtgcacgcgtacaacagacgccgccaaagctccgaactgtggtcgcggtgacctcaataggcggctacgcggtggaggaccgtgacgcaaaaagagctgtatttgaaaacctacgataggaatcgcacacagtgcaaacggccatttggaatccgacgcggacacgcttgcggagcttgattctgtgagtgcacgcgtacaacagacgccgccaaagctccgaactgtggtcgccgtgacctcaataggcggctacgcggtggaggaccgtgacgcaaaaagagctgtatttgaaaacctacgataggaatcgcacacagtgcaaacggccatttggaatccgacgcggacacgcttgcggagcttgattctgtcagtgcacgcgtacaacagacgccgccaaagctccgaactgtggtcgccgtgacctcaataggcggctacgcggtggaggaccgtgacgcaaaaagagctgtatttgaaaacctacgataggaatcgcacacagtgcaaacggccatttggaatccgacgcggacacgcttgcggagcttgattctgtcagtgcacgcgtacaacagacgccgccaaagctccgaactgtggtcgcggtgacctcaataggcggctacgcggtggaggaccgtgacgcaaaaagagctgtatttgaaaacctacgataggaatcgcacacagtgcaaacggccatttggaatccgacgcggacacgcttgcggagcttgattctgtgagtgcacgcgtacaacagacgccgccaaagctccgaactgtggtcgccgtgacctcaataggcggctacgcggtggaggaccgtgacgcaaaaagagctgtatttgaaaacctacgataggaatcgcacacagtgcaaacggccatttggaatccgacgcggacacgcttgcggagcttgattccgtgtgtgcacgcgtacaacagacgcctccaaagctccgaactgtggtcgccgtgacctcaataggcggctacgcggtggaggaccgtgacgcaaaaagagctgtatttgaaaacctacgataggaatcgcacacagtgcaaacggccatttggaatccgacgcggacacgcttgcggagcttgattctgtcagtgcacgcgtacaacagacgccgccaaagctccgaactgtggtcgccgtgacctcaataggcggctacgcggtggaggaccgtgacgcaaaaagagctgtatttgaaaacctacgataggaatcgcacacagtgcaaacggccatttggaatccgacgcggacacgcttgcggagcttgattctgtgagtgcacgcgtacaacagacgccgccaaagctccgaactgtggtcgccgtgacctcaataggcggctacgcggtggaggaccgtgacgcaaaaagagctgtatttgaaaacctacgataggaatcgcacacagtgcaaacggccatttggaatccgacgcggacacgcttgcggagcttgattctgtgagtgcacgcgtacaacagacgccgccaaagctccgaactgtggtcgccgtgacctcaataggcggctacgcggtggaggaccgtgacgcaaaaagagctgtatttgaaaacctacgataggaatcgcacacagtgcaaacggccatttggaatccgacgcggacacgcttgcggagcttgattccgtgtgtgcacgcgtacaacagacgccgccaaagctccgaactgtggtcgccgtgacctcaataggcggctacgcggtggaggaccgtgacgcaaaaagagctgtatttgaaaacctacgataggaatcgcacacagtgcaaacggccatttggaatccgacgcggacacgcttgcggagcttgattctgtgagtgcacgcgtacaacagacgccgccaaagctccgaactgtggtcgccgtgacctcaataggcggctacgcggtggaggaccgtgacgcaaaaagagctgtatttgaaaacctacgataggaatcgcacacagtgcaaacggccatttggaatccgacgcggacacgcttgcggagcttgattctgtgagtgcacgcgtacaacagacgccgccaaagctccgaactgtggtcgccgtgacctcaataggcggctacgcggtggaggaccgtgacgcaaaaagagctgtatttgaaaacctacgataggaatcgcacacagtgcaaacggccatttggaatccgacgcggacacgcttgcggagcttgattctgtgagtgcacgcgtacaacagacgccgccaaagatccgaactgtggtcgccgtgacctcaataggtggctacgcggtggaggaccgtgacgcaaaaagagctgtatttgaaaacctacgataggaatcgcacacagtgcaaacggccatttggaatccgacgcggacacgcttgcggagcttgattctgtgagtgcacgcgtacaacagacgccgccaaagctccgaactgtggtcgccgtgacctcaataggcggctacgcggtggaggaccgtgacgcaaaaagagctgtatttgaaaacctacgataggaatcgcacacagtgcaaacggccatttggaatccgacgcggacacgcttgcggagcttgattccgtgtgtgcacgcgtacaacagacgccgccaaagctccgaactgtggtcgccgtgacctcaataggcggctacgcggtggaggaccgtgacgcaaaaagagctgtatttgaaaacctacgataggaatcgcacacagtgcaaacggccatttggaatccgacgcggacacgcttgcggagcttgattctgtgactgcacgcgtacaacagacgccgccaaagctccgaactgtggtcaccgtgacctcaataggcggctacgcggtggaggaccgtgacgcaaaaagagctgtatttgaaaacctactacgataggaatcgcacacagtgcaaacggccatttggaatccgacgcggacacgcttgcggagcttgattctgtgactgcacgcgtacaacagacgccgccaaagctccgaactgtggtcgccgtgacctcaataggcggctacgcggtggaggaccgtgacgcaaaaagagctgtatttgaaaacctacgataggaatcgcacacagtgcaaacggccatttggaatccgacgcggacacgcttgcggagcttgattctgtgagtgcacgcgtacaacagacgccgccaaagctccgaactgtggtcgccgtgacctcaataggcggctacgcggtggaggaccgtgacgcaaaaagagctgtatttgaaaacctacgataggaatcgcacacagtgcaaacggccatttggaatccgacgcggacacgcttgcggagcttgattctgtgagtgcacgcgtacaacagacgccgccaaagctccgaactgtggtcgccgtgacctcaataggcggctacgcggtggaggaccgtgacgcaaaaagagctgtatttgaaaacctacgataggaatcgcacacagtgcaaacggccatttggaatccgacgcggacacgcttgcggagcttgattctgtgagtgcacgcgtacaacagacgccgccaaagctccgaactgtggtcgccgtgacctcaataggcggctacgcggtggaggaccgtgacgcaaaaagagctgtatttgaaaacctacgataggaatcgcacacagtgcaaacggccatttggaatccgacgcggacacgcttgcggagcttgattctgtcagtgcacgcgtacaacagacgccgccaaagctccgaactgtggtcgccgtgacctcaataggcggctacgcggtggaggaccgtgacgcaaaaagagctgtatttgaaaacctacgataggaatcgcacacagtgcaaacggccatttggaatccgacgcggacacgcttgcggagcttgattctgtcagtgcacgcgtacaatagacgccgccaaagctccgaactgtggtcgccgtgacctcaataggcggctacgcggtggaggaccgtgacgcaaaaagagctgtatttgaaaacctacgataggaatcgcacacagtgcaaacggccatttggaatccgacgcggacacgcttgcggagcttgattctgtgagtgcacgcgtacaacagacgccgccaaagctccgaactgtggtcgccgtgacctcaataggcggctacgcggtggaggaccgtgacgcaaaaagagctgtatttgaaaacctacgataggaatcgcacacagtgcaaacggccatttggaatccgacgcggacacgcttgcggagcttgattctgtgagtgcacgcgtacaacagacgccgccaaagctccgaactgtggtcgccgtgacctcaataggcggctacgcggtggaggaccgtgacgcaaaaagagctgtatttgaaaacctacgataggaatcgcacacagtgcaaacggccatttggaatccgacgcggacacgcttgcggagcttgattctgtgagtgcacgcgtacaacagacgccgccaaagctccgaactgtggtcgccgtgacctcaataggcggctacgcggtggaggaccgtgacgcaaaaagagctgtatttgaaaacctacgataggaatcgcacacagtgcaaacggccatttggaatccgacgcggacacgcttgcggagcttgattctgtgagtgcacgcgtacaacagacgccgccaaagctccgaactgtggtcgccgtgacctcaataggcggctacgcggtggaggaccgtgacgcaaaaagagctgtatttgaaaacctacgataggaatcgcacacagtgcaaacggccatttggaatccgacgcggacacgcttgcggagcttgattctgtgactgcacgcgtacaacagacgccgccaaagatccgaactgtggtcgccgtgacctcaataggcggctacgcggtggaggaccgtgacgcaaaaaagagctgtatttgaaaacctactacgataggaatcgcacacagtgcaaacggccatttggaatccgacgcggacacgcttgcggagcttgattctgtgggtgcacgcgtacaacagacgccgccaaagatccgaactgtggtcgccgtgacctcaataggcggctacgcggtggaggaccgtgacgcaaaaagagctgtatttgaaaacctacgataggaatcgcacacagtgcaaacggccatttggaatccgacgcggacacgcttgcggagcttgattctgtgactgcacgcgtacaacagacgccgccaaagctccgaactgtggtcgccgtgacctcaataggcggctacgcggtggaggaccgtgacgcaaaaagagctgtatttgaaaacctacgataggaatcgcacacagtgcaaacggccatttggaatccgacgcggacacgcttgcggagcttgattctgtgagtgcacgcgtacaacagacgccgccaaagctccgaactgtggtcgccgtgacctcaataggcggctacgcggtggaggaccgtgacgcaaaaagagctgtatttgaaaacctacgataggaatcgcacacagtgcaaacggccatttggaatccgacgcggacacgcttgcggagcttgattccgtgtgtgcacgcgtacaacagacgccgccaaagctccgaactgtggtcgccgtgacctcaataggcggctacgcggtggaggaccgtgacgcaaaaagagctgtatttgaaaacctacgataggaatcgcacacagtgcaaacggccatttggaatccgacgcggacacgcttgcggagcttgattctgtgagtgcacgcgtacaacagacgccgccaaagctccgaactgtggtcgccgtgacctcaataggcggctacgcggtggaggaccgtgacgcaaaaagagctgtatttgaaaacctacgataggaatcgcacacagtgcaaacggccatttggaatccgacgcggacacgcttgcggagcttgattccgtgtgtgcacgcgtacaacagacgccgccaaagttccgaactgtggtcgccgtgacctcaataggcggctacgcggtggaggaccgagacgcaaaaagagctgtatttgaaaacctacgataggaatcgcacacagtgcaaacggccatttggaatccgacgcggacacgcttgcggagcttggttctgtgagtgcacgcgtacaacagacgccgccaaagctccgaactgtggtcgccgtgacctcaataggcggctacgcggtggaggaccgtgacgcaaaaagagctgtatttgaaaacctacgataggaatcgcacacagtgcaaacggccatttggaatccgacgcggacacgcttgcggagcttggttctgtgagtgcacgcgtacaacagacgccaccaaagctccgaactgtggtcgccgtgacctcaataggcggctacgcggtggaggaccgtgacgcaaaaagagctgtatttgaaaacctacgataggaatcgcacacagtgcaaacggccatttggaatccgacgcggacacgcttgcggagcttgattccgtgtgtgcacgcgtacaacagacgccgccaaagttccgaactgtggtcgccgtgacctcaataggcggctacgcggtggaggaccgtgacgcaaaaagagctgtatttgaaaacctacgataggaatcgcacacagtgcaaacggccatttggaatccgacgcggacacgcttgcggagcttgattccgtgtgtgcacgcgtacaacagacgccgccaaagttccgaactgtggtcgccgtgacctcaataggcggctacgcggtggaggaccgtgacgcaaaaagagctgtatttgaaaacctacgataggaatcgcacacagtgcaaacggccatttggaatccgacgcggacacgcttgcggagcttggttctgtgagtgcacgcgtacaacagacgccgccaaagctccgaactgtggtcgccgtgacctcaataggcggctacgcggtggaggaccgtgacgcaaaaagagctgtatttgaaaacctacgataggaatcgcacacagtgcaaacggccatttggaatccgacgcggacacgcttgcggagcttggttctgtgagtgcacgcgtacaacagacgccgccaaagctccgaactgtggtcgccgtgacctcaataggcggctacgcggtggaggaccgtgacgcaaaaagagctgtatttgaaaacctactacgataggaatcgcacacagtgcaaacggccatttggaatccgacgcggacacgcttgcggagcttgattccgtgtgtgcacgcgtacaacagacgccgccaaagatccgaactgtggtcgccgtgacctcaataggcggctacgcggtggaggaccgtgacgcaaaaagagctgtatttgaaaacctacgataggaatcgcacacagtgcaaacggccatttggaatccgacgcggacacgcttgcggagcttgattctgtgagtgcacgcgtacaacagacgccgccaaagatccgaactgtggtcgccgtgacctcaataggcggctacgcggtggaggaccgtgacgcaaaaagagctgtatttgaaaacctacgataggaatcgcacacagtgcaaacggccatttggaatccgacgcggacacgcttgcggagcttgattctgtgagtgcacgcgtacaacagacgccgccaaagatccgaactgtggtcgccgtgacctcaataggcggctacgcggtggaggaccgtgacgcaaaaagagctgtatttgaaaacctacgataggaatcgcacacagtgcaaacggccatttggaatccgacgcggacacgcttgcggagcttgattctgtgagtgcacgcgtacaacagacgccgccaaagctccgaactgtggtcgccgtgacctcaataggcggctacgcggtggaggaccgtgacgcaaaaagagctgtatttgaaaacctacgataggaatcgcacacagtgcaaacggccatttggaatccgacgcggacacgcttgcggagcttggttctgtgagtgcacgcgtacaacagacgccgccaaagctccgaactgtggtcgccgtgacctcaataggcggctacgcggtggaggaccgtgacgcaaaaagagctgtatttgaaaacctacgataggaatcgcacacagtgcaaacggccatttggaatccgacgcggacacgcttgcggagcttgattctgtgagtgcacgcgtacaacagacgccgccaaagctccgaactgtggtcgccgtgacctcaataggcggctacgcggtggaggaccgtgacgcaaaaagagctgtatttgaaaacctacgataggaatcgcacacagtgcaaacggccatttggaatccgacgcggacacgcttgcggagcttgattctgtgggtgcacgcgtacaacagacgccgccaaagatccgaactgtggtcgccgtgacctcaataggcggctacgcggtggaggaccgtgacgcaaaaagagctgtatttgaaaacctacgataggaatcgcacacagtgcaaacggccatttggaatccgacgcggacacgcttgcggagcttgattctgtgggtgcacgcgtacaacagacgccgccaaagctccgaactgtggtcgccgtgacctcaataggcggctacgcggtggaggaccgtgacgcaaaaagagctgtatttgaaaacctacgataggaatcgcacacagtgcaaacggccatttggaatccgacgcggacacgcttgcggagcttgattctgtgagtgcacgcgtacaacagacgccgccaaagctccgaactgtggtcgccgtgacctcaataggcggctacgcggtggaggaccgtgacgcaaaaagagctgtatttgaaaacctacgataggaatcgcacacagtgcaaacggccatttggaatccgacgcggacacgcttgcggagcttgattctgtgagtgcacgcgtacaacagacgccgccaaagatccgaactgtggtcgccgtgacctcaataggtggctacgcggtggaggaccgtgacgcaaaaagagctgtatttgaaaacctacgataggaatcgcacacagtgcaaacggccatttggaatccgacgcggacacgcttgcggagcttgattctgtgagtgcacgcgtacaacagacgccgccaaagctccgaactgtggtcgccgtgacctcaataggcggctacgcggtggaggaccgtgacgcaaaaagagctgtatttgaaaacctacgataggaatcgcacacagtgcaaacggccatttggaatccgacgcggacacgcttgcggagcttgattctgtgggtgcacgcgtacaacagacgccgccaaagctccgaactgtggtcgcggtgacctcaataggcggctacgcggtggaggaccgtgacgcaaaaagagctgtatttgaaaacctacgataggaatcgcacacagtgcaaacggccatttggaatccgacgcggacacgcttgcggagcttgattctgtcagtgcacgcgtacaacagacgccgccaaagctccgaactgtggtcgccgtgacctcaataggcggctacgcggtggaggaccgtgacgcaaaaagagctgtattgaaaacctacgataggaatcgcacacagtgcaaacggccatttggaatccgacgcggacacgcttgcggagcttgattctgtgagtgcacgcgtacaacagacgccgccaaagatccgaactgtggtcgccgtgacctcaataggcggctacgcggtggaggaccgtgacgcaaaaagagctgtatttgaaaacctacgataggaatcgcacacagtgcaaacggccatttggaatccgacgcggacacgcttgcggagcttgattctgtgagtgcacgcgtacaacagacgccgccaaagctccgaactgtggtcgccgtgacctcaataggcggctacgcggtggaggaccgtgacgcaaaaagagctgtatttgaaaacctacgataggaatcgcacacagtgcaaacggccatttggaatccgacgcggacacgcttgcggagcttgattctgtgagtgcacgcgtacaacagacgccgccaaagctccgaactgtggtcgccgtgacctcaataggcggctacgcggtggaggaccgtgacgcaaaaagagctgtatttgaaaacctacgataggaatcgcacacagtgcaaacggccatttggaatccgacgcggacacgcttgcggagcttgattctgtcagtgcacgcgtacaacagacgccgccaaagctccgaactgtggtcgcggtgacctcaataggcggctacgcggtggaggaccgtgacgcaaaaagagctgtatttgaaaacctacgataggaatcgcacacagtgcaaacggccatttggaatccgacgcggacacgcttgcggagcttgattctgtgagtgcacgcgtacaacagacgccgccaaagctccgaactgtggtcgccgtgacctcaataggcggctacgcggtggaggaccgtgacgcaaaaagagctgtatttgaaaacctacgataggaatcgcacacagtgcaaacggccatttggaatccgacgcggacacgcttgcggagcttgattccgtgtgtgcacgcgtacaacagacgcctccaaagctccgaactgtggtcgccgtgacctcaataggcggctacgcggtggaggaccgtgacgcaaaaagagctgtatttgaaaacctacgataggaatcgcacacagtgcaaacggccatttggaatccgacgcggacacgcttgcggagcttgattctgtcagtgcacgcgtacaatagacgccgccaaagctccgaactgtggtcgccgtgacctcaataggcggctacgcggtggaggaccgtgacgcaaaaagagctgtatttgaaaacctacgataggaatcgcacacagtgcaaacggccatttggaatccgacgcggacacgcttgcggagcttgattctgtcagtgcacgcgtacaacagacgcctccaaagctccgaactgtggtcgccgtgacctcaataggcggctacgcggtggaggaccgtgacgcaaaaagagctgtatttgaaaacctacgataggaatcgcacacagtgcaaacggccatttggaatccgacgcggacacgcttgcggagcttgattctgtgagtgcacgcgtacaacagacgccgccaaagctccgaactgtggtcaccgtgacctcaataggcggctacgcggtggaggaccgtgacgcaaaaagagctgtatttgaaaacctacgataggaatcgcacacagtgcaaacggccatttggaatccgacgcggacacgcttgcggagcttgattctgtgagtgcacgcgtacaacagacgccgccaaagctccgaactgtggtcgccgtgacctcaataggcggctacgcggtggaggaccgagacgcaaaaagagctgtatttgaaaacctacgataggaatcgcacacagtgcaaacggccatttggaatccgacgcggacacgcttgcggagcttgcttctgtgagtgcacgcgtataacagacgccgccaaagctccgaactgtggtcgccgtgacctcaataggcggctacgcggtggaggaccgtgacgcaaaaagagctgtatttgaaaacctacgataggaatcgcacacagtgcaaacggccatttggaatccgacgcggacacgcttgcggagcttgattctgtcagtgcacgcgtacaacagacgccgccaaagctccgaactgtggtcgccgtgacctcaataggcggctacgcggtggaggaccgtgacgcaaaaagagctgtatttgaaaacctacgataggaatcgcacacagtgcaaacggccatttggaatccgacgcggacacgcttgcggagcttgattcttagggtgcacgcgtacaacagacgccgccaaagctccgaactgtggtcgccgtgacctcaataggcggctacgcggtggaggaccgtgacgcaaaaagagctgtatttgaaaacctacgataggaatcgcacacagtgcaaacggccatttggaatccgacgcggacacgcttgcggagcttgattctgtcagtgcacgcgtacaacagacgccgccaaagctccgaactgtggtcgccgtgacctcaataggcggctacgcggtggaggaccgtgacgcaaaaagagctgtatttgaaaacctacgataggaatcgcacacagtgcaaacggccatttggaatccgacgcggacacgcttgcggagcttgattctgtcagtgcacgcgtacaacagacgccgccaaagctccgaactgtggtcgccgtgacctcaataggcggctacgcggtggaggaccgtgacgcaaaaagagctgtatttgaaaacctacgataggaatcgcacacagtgcaaacggccatttggaatccgacgcggacacgcttgcggagcttgattctgtcagtgcacgcgtacaatagacgccgccaaagctccgaactgtggtcgccgtgacctcaataggcggctacgcggtggaggaccgtgacgcaaaaagagctgtatttgaaaacctacgataggaatcgcacacagtgcaaacggccatttggaatccgacgcggacacgcttgcggagcttgattctgtcagtgcacgcgtacaacagacgccgccaaagctccgaactgtggtcgccgtgacctcaataggcggctacgcggtggaggaccgtgacgcaaaaagagctgtatttgaaaacctacgataggaatcgcacacagtgcaaacggccatttggaatccgacgcggacacgcttgcggagcttgattctgtgggtgcacgcgtacaacagacgccgccaaagctccgaactgtggtcgccgtgacctcaataggcggctacgcggtggaggaccgtgacgcaaaaagagctgtatttgaaaacctacgataggaatcgcacacagtgcaaacggccatttggaatccgacgcggacacgcttgcggagcttgattctgtgggtgcacgcgtacaacagacgccgccaaagctccgaactgtggtcgccgtgacctcaataggcggctacgcggtggaggaccgtgacgcacaaagagctgtatttgaaaacctacgataggaatcgcacacagtgcaaacggccatttggaatccgacgcggacacgcttgcggagcttgattctgtgggtgcacgcgtacaacagacgccgccaaagctccgaactgtggtcgccgtgacctcaataggcggctacgcggtggaggaccgtgacgcacaaagagctgtatttgaaaacctacgataggaatcgcacacagtgcaaacggccatttggaatccgacgcggacacgcttgcggagcttgattctgtgggtgcacgcgtacaacagacgccgccaaagctccgaactgtggtcgccgtgacctcaataggcggctacgcggtggaggaccgtgacgcaaaaagagctgtatttgaaaacctacgataggaatcgcacacagtgcaaacggccatttggaatccgacgcggacacgcttgcggagcttgattctgtgagtgcacgcgtacaacagacgccgccaaagctccgaactgtggtcgccgtgacctcaataggcggctacgcggtggaggaccgtgacgcacaaagagctgtatttgaaaacctacgataggaatcgcacacagtgcaaacggccatttggaatccgacgcggacacgcttgcggagcttgattctgtgggtgcacgcgtacaacagacgccgccaaagctccgaactgtggtcgccgtgacctcaataggcggctacgcggtggaggaccgtgacgcaaaaagagctgtatttgaaaacctacgataggaatcgcacacagtgcaaacggccatttggaatccgacgcggacacgcttgcggagcttgattctgtgagtgcacgcgtacaacagacgccgccaaagctccgaactgtggtcgccgtgacctcaataggcggctacgcggtggaggaccgtgacgcaaaaagagctgtatttgaaaacctacgataggaatcgcacacagtgcaaacggccatttggaatccgacgcggacacgcttgcggagcttgattctgtgggtgcacgcgtacaacagacgccgccaaagctccgaactgtggtcgccgtgacctcaataggcggctacgcggtggaggaccgtgacgcaaaaagagctgtatttgaaaacctacgataggaatcgcacacagtgcaaacggccatttggaatccgacgcggacacgcttgcggagcttgattctgtgagtgcacgcgtacaacagacgccgccaaagctccgaactgtggtcgccgtgacctcaataggcggctacgcggtggaggaccgtgacgcaaaaagagctgtatttgaaaacctacgataggaatcgcacacagtgcaaacggccatttggaatccgacgcggacacgcttgcggagcttgattctgtgggtgcacgcgtacaacagacgccgccaaagctccgaactgtggtcgccgtgacctcaataggcggctacgcggtggaggaccgtgacgcaaaaagagctgtatttgaaaacctacgataggaatcgcacacagtgcaaacggccatttggaatccgacgcggacacgcttgcggagcttgattctgtgggtgcacgcgtacaacagacgccgccaaagctccgaactgtggtcgccgtgacctcaataggcggctacgcggtggaggaccgagacgcaaaagagctgtatttgaaaacctacgataggaatcgcacacagtgcaaacggccatttggaatccgacgcggacacgcttgcggagcttgattctgtgggtgcacgcgtacaacagacgccgccaaagctccgaactgtggtcgccgtgacctcaataggcggctacgcgatggaggaccgagacgcaaaaagagctgtatttgaaaacctacgataggaatcgcacacagtgcaaacggccatttggaatccgacgcggacacgcttgcggagcttgattctgtgactgcacgcgtacaacagacgccgccaaagctccgaactgtggtcaccgtgacctcaataggcggctacgcggtggaggaccgtgacgcaaaaagagctgtatttgaaaacctactacgataggaatcgcacacagtgcaaacggccatttggaatccgacgcggacacgcttgcggagcttgattctgtgggtgcacgcgtacaacagacgccgccaaagctccgaactgtggtcgccgtgacctcaataggcggctacgcgatggaggaccgagacgcaaaaagagctgtatttgaaaacctacgataggaatcgcacacagtgcaaacggccatttggaatccgacgcggacacgcttgcggagcttgattctgtgactgcacgcgtacaacagacgccgccaaagctccgaactgtggtcaccgtgacctcaataggcggctacgcggtggaggaccgtgacgcaaaaagagctgtatttgaaaacctacgataggaatcgcacacagtgcaaacggccatttggaatccgacgcggacacgcttgcggagcttgattctgtgggtgcacgcgtacaacagacgccgccaaagctccgaactgtggtcgccgtgacctcaataggcggctacgcgatggaggaccgagacgcaaaaagagctgtatttgaaaacctacgataggaatcgcacacagtgcaaacggccatttggaatccgacgcggacacgcttgcggagcttgattctgtgactgcacgcgtacaacagacgccgccaaagctccgaactgtggtcaccgtgacctcaataggcggctacgcggtggaggaccgtgacgcaaaaagagctgtatttgaaaacctactacgataggaatcgcacacagtgcaaacggccatttggaatccgacgcggacacgcttgcggagcttgattctgtgggtgcacgcgtacaacagacgccgccaaagctccgaactgtggtcgccgtgacctcaataggcggctacgcgatggaggaccgagacgcaaaaagagctgtatttgaaaacctacgataggaatcgcacacagtgcaaacggccatttggaatccgacgcggacacgcttgcggagcttgattctgtgactgcacgcgtacaacagacgccgccaaagctccgaactgtggtcaccgtgacctcaataggcggctacgcggtggaggaccgtgacgcaaaaagagctgtatttgaaaacctactacgataggaatcgcacacagtgcaaacggccatttggaatccgacgcggacacgcttgcggagcttgattctgtgggtgcacgcgtacaacagacgccgccaaagctccgaactgtggtcgccgtgacctcaataggcggctacgcgatggaggaccgagacgcaaaaagagctgtatttgaaaacctacgataggaatcgcacacagtgcaaacggccatttggaatccgacgcggacacgcttgcggagcttgattctgtgactgcacgcgtacaacagacgccgccaaagctccgaactgtggtcaccgtgacctcaataggcggctacgcggtggaggaccgtgacgcaaaaagagctgtatttgaaaacctactacgataggaatcgcacacagtgcaaacggccatttggaatccgacgcggacacgcttgcggagcttgattctgtgagtgcacgcgtacaacagacgccgccaaagctccgaactgtggtcgccgtgacctcaataggcggctacgcggtggaggaccgtgacgcaaaaagacctgtatttgaaaacctacgataggaatcgcacacagtgcaaacggccatttggaatccgacgcggacacgcttgcggagcttgattctgtgagtgcacgcgtacaacagacgccgccaaagctccgaactgtggtcgccgtgacctcaataggcggctacgcggtggaggaccgtgacgcaaaaagagctgtatttgaaaacctactacgataggaatcgcacacagtgcaaacggccatttggaatccgacgcggacacgcttgcggagcttgattctgtgggtgcacgcgtacaacagacgccgccaaagctccgaactgtggtcgccgtgacctcaataggcggctacgcgatggaggaccgagacgcaaaaagagctgtatttgaaaacctacgataggaatcgcacacagtgcaaacggccatttggaatccgacgcggacacgcttgcggagcttgattctgtgactgcacgcgtacaacagacgccgccaaagctccgaactgtggtcgccgtgacctcaataggcggctacgcgatggaggaccgagacgcaaaaagagctgtatttgaaaacctacgataggaatcgcacacagtgcaaacggccatttggaatccgacgcggacacgcttgcggagcttgattctgtgactgcacgcgtacaacagacgccgccaaagctccgaactgtggtcaccgtgacctcaataggcggctacgcggtggaggaccgtgacgcaaaaagagctgtatttgaaaacctactacgataggaatcgcacacagtgcaaacggccatttggaatccgacgcggacacgcttgcggagcttgattctgtgagtgcacgcgtacaacagacgccgccaaagctccgaactgtggtcgccgtgacctcaataggcggctacgcgatggaggaccgagacgcaaaaagacctgtatttgaaaacctacgataggaatcgcacacagtgcaaacggccatttggaatccgacgcggacacgcttgcggagcttgattctgtgactgcacgcgtacaacagacgccgccaaagctccgaactgtggtcaccgtgacctcaataggcggctacgcggtggaggaccgtgacgcaaaaagagctgtatttgaaaacctacgataggaatcgcacacagtgcaaacggccatttggaatccgacgcggacacgcttgcggagcttgattctgtgagtgcacgcgtacaacagacgccgccaaagctccgaactgtggtcgccgtgacctcaataggcggctacgcggtggaggaccgtgacgcaaaaagagctgtatttgaaaacctacgataggaatcgcacacagtgcaaacggccatttggaatccgacgcggacacgcttgcggagcttgattctgtgagtgcacgcgtacaacagacgccgccaaagctccgaactgtggtcaccgtgacctcaataggcggctacgcggtggaggaccgtgacgcaaaaagagctgtatttgaaaacctacgataggaatcgcacacagtgcaaacggccatttggaatccgacgcggacacgcttgcggagcttgattctgtgactgcacgcgtacaacagacgccgccaaagctccgaactgtggtcaccgtgacctcaataggcggctacgcggtggaggaccgtgacgcaaaaagtgctgtatttgaaaacctactacgataggaatcgcacacagtgcaaacggccatttggaatccgacgcggacacgcttgcggagcttgattctgtgagtgcacgcgtacaacagacgccgccaaagctccgaactgtggtcgccgtgacctcaataggcggctacgcggtggaggaccgtgacgcaaaaagagctgtatttgaaaacctacgataggaatcgcacacagtgcaaacggccatttggaatccgacgcggacacgcttgcggagcttgattctgtgagtgcacgcgtacaacagacgccgccaaagctccgaactgtggtcgccgtaacctcaataggcggctacgcggtggaggaccgtgacgcaaaaagagctgtatttgaaaacctactacgataggaatcgcacacagtgcaaacggccatttggaatccgacgcggacacgcttgcggagcttgattctgtgactgcacgcgtacaacagacgccgccaaagctccgaactgtggtcgccgtgacctcaataggcggctacgcggtggaggaccgtgacgcaaaaagagctgtatttgaaaacctacgataggaatcgcacacagtgcaaacggccatttggaatccgacgcggacacgcttgcggagcttgattctgtgactgcacgcgtacaacagacgccgccaaagctccgaactgtggtcgccgtgacctcaataggcggctacgcggtggaggaccgtgacgcaaaaagagctgtatttgaaaacctacgataggaatcgcacacagtgcaaacggccatttggaatccgacgcggacacgcttgcggagcttgattctgtgactgcacgcgtacaacagacgccgccaaagctccgaactgtggtcgccgtgacctcaataggcggctacgcggtggaggaccgtgacgcaaaaagacctgtatttgaaaacctacgataggaatcgcacacagtgcaaacggccatttggaatccgacgcggacacgcttgcggagcttgattctgtgagtgcacgcgtacaacagacgccgccaaagctccgaactgtggtcgccgtgacctcaataggcggctacgcggtggaggaccgtgacgcaaaaagagctgtatttgaaaacctacgataggaatcgcacacagtgcaaacggccatttggaatccgacgcggacacgcttgcggagcttgattctgtgagtgcacgcgtacaacagacgccgccaaagctccgaactgtggtcgccgtgacctcaataggcggctacgcggtggaggaccgtgacgcaaaaagagctgtatttgaaaacctacgataggaatcgcacacagtgcaaacggccatttggaatccgacgcggacacgcttgcggagcttgattctgtgagtgcacgcgtacaacagacgccgccaaagctccgaactgtggtcgccgtgacctcaataggcggctacgcggtggaggaccgtgacgcaaaaagagctgtatttgaaaacctacgataggaatcgcacacagtgcaaacggccatttggaatccgacgcggacacgcttgcggagcttgattctgtgactgcacgcgtacaacagacgccgccaaagctccgaactgtggtcgccgtgacctcaataggcggctacgcggtggaggaccgtgacgcaaaaagacctgtatttgaaaacctacgataggaatcgcacacagtgcaaacggccatttggaatccgacgcggacacgcttgcggagcttgattctgtgactgcacgcgtacaacagacgccgccaaagctccgaactgtggtcgccgtgacctcaataggcggctacgcggtggaggaccgtgacgcaaaaagagctgtatttgaaaacctacgataggaatcgcacacagtgcaaacggccatttggaatccgacgcggacacgcttgcggagcttgattctgtgagtgcacgcgtacaacagacgccgccaaagctccgaactgtggtcgccgtgacctcaataggcggctacgcggtggaggaccgtgacgcaaaaagagctgtatttgaaaacctacgataggaatcgcacacagtgcaaacggccatttggaatccgacgcggacacgcttgcggagcttgattctgtgagtgcacgcgtacaacagacgccgccaaagctccgaactgtggtcgccgtgacctcaataggcggctacgcggtggaggaccgtgacgcaaaaagagctgtatttgaaaacctacgataggaatcgcacacagtgcaaacggccatttggaatccgacgcggacacgcttgcggagcttgattctgtgagtgcacgcgtacaacagacgccgccaaagctccgaactgtggtcgccgtgacctcaataggcggctacgcggtggaggaccgtgacgcaaaaagagctgtatttgaaaacctacgataggaatcgcacacagtgcaaacggccatttggaatccgacgcggacacgcttgcggagcttgattctgtgactgcacgcgtacaacagacgccgccaaagctccgaactgtggtcgccgtgacctcaataggcggctacgcggtggaggaccgtgacgcaaaaagagctgtatttgaaaacctacgataggaatcgcacacagtgcaaacggccatttggaatccgacgcggacacgcttgcggagcttgattctgtgagtgcacgcgtacaacagacgccgccaaagctccgaactgtggtcgccgtgacctcaataggcggctacgcggtggaggaccgtgacgcaaaaagagctgtatttgaaaacctacgataggaatcgcacacagtgcaaacggccatttggaatccgacgcggacacgcttgcggagcttgattccgtgtgtgcacgcgtacaacagacgccgccaaagctccgaactgtggtcgccgtgacctcaataggcggctacgcggtggaggaccgtgacgcaaaaagagctgtatttgaaaacctacgataggaatcgcacacagtgcaaacggccatttggaatccgacgcggacacgcttgcggagcttgattctgtgactgcacgcgtacaacagacgccgccaaagctccgaactgtggtcaccgtgacctcaataggcggctacgcggtggaggaccgtgacgcaaaaagagctgtatttgaaaacctactacgataggaatcgcacacagtgcaaacggccatttggaatccgacgcggacacgcttgcggagcttgattctgtgactgcacgcgtacaacagacgccgccaaagctccgaactgtggtcgccgtgacctcaataggcggctacgcggtggaggaccgtgacgcaaaaagacctgtatttgaaaacctacgataggaatcgcacacagtgcaaacggccatttggaatccgacgcggacacgcttgcggagcttgattctgtgactgcacgcgtacaacagacgccgccaaagctccgaactgtggtcgccgtgacctcaataggcggctacgcggtggaggaccgtgacgcaaaaagagctgtatttgaaaacctacgataggaatcgcacacagtgcaaacggccatttggaatccgacgcggacacgcttgcggagcttgattctgtgagtgcacgcgtacaacagacgccgccaaagctccgaactgtggtcgccgtgacctcaataggcggctacgcggtggaggaccgtgacgcaaaaagagctgtatttgaaaacctacgataggaatcgcacacagtgcaaacggccatttggaatccgacgcggacacgcttgcggagcttgattctgtgagtgcacgcgtacaacagacgccgccaaagctccgaactgtggtcaccgtgacctcaataggcggctacgcggtggaggaccgtgacgcaaaaagagctgtatttgaaaacctacgataggaatcgcacacagtgcaaacggccatttggaatccgacgcggacacgcttgcggagcttgattctgtgagtgcacgcgtacaacagacgccgccaaagctccgaactgtggtcgccgtgacctcaataggcggctacgcggtggaggaccgtgacgcaaaaagagctgtatttgaaaacctacgataggaatcgcacacagtgcaaacggccatttggaatccgacgcggacacgcttgcggagcttgattctgtgagtgcacgcgtacaacagacgccgccaaagctccgaactgtggtcaccgtgacctcaataggcggctacgcggtggaggaccgtgacgcaaaaagacctgtatttgaaaacctacgataggaatcgcacacagtgcaaacggccatttggaatccgacgcggacacgcttgcggagcttgattctgtgagtgcacgcgtacaacagacgccgccaaagctccgaactgtggtcgccgtgacctcaataggcggctacgcggtggaggaccgtgacgcaaaaagagctgtatttgaaaacctacgataggaatcgcacacagtgcaaacggcgatttggaatccgacgcggacacgcttgcggagcttgattctgtgagtgcacgcgtacaacagacgccgccaaagctccgaactgtggtcaccgtgacctcaataggcggctacgcggtggaggaccgtgacgcaaaaagagctgtatttgaaaacctacgataggaatcgcacacagtgcaaacggccatttggaatccgacgcggacacgcttgcggagcttgattctgtgagtgcacgcgtacaacagacgccgccaaagctccgaactgtggtcgccgtgacctcaataggcggctacgcggtggaggaccgtgacgcaaaaagagctgtatttgaaaacctacaataggaatcgcacacagtgcaaacggccatttggaatccgacgcggacacgcttgcggagcttgattctgtgactgcacgcgtacaacagacgccgccaaagctccgaactgtggtcaccgtgacctcaataggcggctacgcggtggaggaccgtgacgcaaaaagagctgtatttgaaaacctacaataggaatcgcacacagtgcaaacggccatttggaatccgacgcggacacgcttgcggagcttgattctgtgagtgcacgcgtacaacagacgccgccaaagctccgaactgtggtcgccgtgacctcaataggcggctacgcggtggaggaccgtgacgcaaaaagagctgtatttgaaaacctacaataggaatcgcacacagtgcaaacggccatttggaatccgacgcggacacgcttgcggagcttgattctgtgggtgcacgcgtacaacagacgccgccaaagctccgaactgtggtcgccgtgacctcaataggcggctacgcggtggaggaccgtgacgcaaaaagagctgtatttgaaaacctacgataggaatcgcacacagtgcaaacggccatttggaatccgacgcggacacgcttgcggagcttgattctgtgagtgcacgcgtacaacagacgccgccaaagctccgaactgtggtcgccgtgacctcaataggcggctacgcggtggaggaccgtgacgcaaaaagagctgtatttgaaaacctacgataggaatcgcacacagtgcaaacggccatttggaatccgacgcggacacgcttgcggagcttgattctgtgggtgcacgcgtacaacagacgccgccaaagctccgaactgtggtcgccgtgacctcaataggcggctacgcggtggaggaccgtgacgcaaaaagagctgtatttgaaaacctacgataggaatcgcacacagtgcaaacggccatttggaatccgacgcggacacgcttgcggagcttgattctgtgggtgcacgcgtacaacagacgccgccaaagctccgaactgtggtcgccgtgacctcaataggcggctacgcggtggaggaccgagacgcaaaagagctgtatttgaaaacctacgataggaatcgcacacagtgcaaacggccatttggaatccgacgcggacacgcttgcggagcttgattctgtgggtgcacgcgtacaacagacgccgccaaagctccgaactgtggtcgccgtgacctcaataggcggctacgcggtggaggaccgtgacgcacaaagagctgtatttgaaaacctacgataggaatcgcacacagtgcaaacggccatttggaatccgacgcggacacgcttgcggagcttgattctgtgggtgcacgcgtacaacagacgccgccaaagctccgaactgtggtcgccgtgacctcaataggcggctacgcggtggaggaccgtgacgcaaaaagagctgtatttgaaaacctacgataggaatcgcacacagtgcaaacggccatttggaatccgacgcggacacgcttgcggagcttgattctgtgagtgcacgcgtacaacagacgccgccaaagctccgaactgtggtcaccgtgacctcaataggcggctacgcggtggaggaccgtgacgcaaaaagagctgtatttgaaaacctacgataggaatcgcacacagtgcaaacggccatttggaatccgacgcggacacgcttgcggagcttgattctgtgggtgcacgcgtacaacagacgccgccaaagctccgaactgtggtcgccgtgacctcaataggcggctacgcggtggaggaccgagacgcaaaaagagctgtatttgaaaacctacgataggaatcgcacacagtgcaaacggccatttggaatccgacgcggacacgcttgcggagcttgattctgtgagtgcacgcgtacaacagacgccgccaaagctccgaactgtggtcgccgtgacctcaataggcggctacgcggtggaggaccgtgacgcaaaaagagctgtatttgaaaacctacgataggaatcgcacacagtgcaaacggccatttggaatccgacgcggacacgcttgcggagcttgattctgtcagtgcacgcgtacaacagacgccgccaaagctccgaactgtggtcgccgtgacctcaataggcggctacgcggtggaggaccgtgacgcaaaaagagctgtatttgaaaacctacgataggaatcgcacacagtgcaaacggccatttggaatccgacgcggacacgcttgcggagcttgattctgtgggtgcacgcgtacaacagacgccgccaaagctccgaactgtggtcgccgtgacctcaataggcggctacgcggtggaggaccgagacgcaaaaagagctgtatttgaaaacctacgataggaatcgcacacagtgcaaacggccatttggaatccgacgcggacacgcttgcggagcttgattctgtgagtgcacgcgtacaacagacgccgccaaagctccgaactgtggtcgccgtgacctcaataggcggctacgcggtggaggaccgtgacgcaaaaagagctgtatttgaaaacctacgataggaatcgcacacagtgcaaacggccatttggaatccgacgcggacacgcttgcggagcttgattctgtcagtgcacgcgtacaacagacgccgccaaagctccgaactgtggtcgccgtgacctcaataggcggctacgcggtggaggaccgtgacgcaaaaagagctgtatttgaaaacctacgataggaatcgcacacagtgcaaacggccatttggaatccgacgcggacacgcttgcggagcttgattctgtgggtgcacgcgtacaacagacgccgccaaagctccgaactgtggtcgccgtgacctcaataggcggctacgcggtggaggaccgagacgcaaaaagagctgtatttgaaaacctacgataggaatcgcacacagtgcaaacggccatttggaatccgacgcggacacgcttgcggagcttgattctgtgagtgcacgcgtacaacagacgccgccaaagctccgaactgtggtcgccgtgacctcaataggcggctacgcggtggaggaccgtgacgcaaaaagagctgtatttgaaaacctacgataggaatcgcacacagtgcaaacggccatttggaatccgacgcggacacgcttgcggagcttgattctgtgagtgcacgcgtacaacagacgccgccaaagctccgaactgtggtcaccgtgacctcaataggcggctacgcggtggaggaccgtgacgcaaaaagagctgtatttgaaaacctacgataggaatcgcacacagtgcaaacggccatttggaatccgacgcggacacgcttgcggagcttgattctgtgggtgcacgcgtacaacagacgccgccaaagctccgaactgtggtcgccgtgacctcaataggcggctacgcggtggaggaccgagacgcaaaaagagctgtatttgaaaacctacgataggaatcgcacacagtgcaaacggccatttggaatccgacgcggacacgcttgcggagcttgattctgtgagtgcacgcgtacaacagacgccgccaaagctccgaactgtggtcgccgtgacctcaataggcggctacgcggtggaggaccgtgacgcaaaaagagctgtatttgaaaacctacgataggaatcgcacacagtgcaaacggccatttggaatccgacgcggacacgcttgcggagcttgattctgtgagtgcacgcgtacaacagacgccgccaaagctccgaactgtggtcgccgtgacctcaataggcggctacgcggtggaggaccgtgacgcaaaaagagctgtatttgaaaacctacgataggaatcgcacacagtgcaaacggccatttggaatccgacgcggacacgcttgcggagcttgattctgtcagtgcacgcgtacaacagacgccgccaaagctccgaactgtggtcgccgtgacctcaataggcggctacgcggtggaggaccgtgacgcacaaagagctgtatttgaaaacctacgataggaatcgcacacagtgcaaacggccatttggaatccgacgcggacacgcttgcggagcttgattctgtgggtgcacgcgtacaacagacgccgccaaagctccgaactgtggtcgccgtgacctcaataggcggctacgcggtggaggaccgtgacgcaaaaagagctgtatttgaaaacctacgataggaatcgcacacagtgcaaacggccatttggaatccgacgcggacacgcttgcggagcttgattctgtgagtgcacgcgtacaacagacgccgccaaagctccgaactgtggtcgccgtgacctcaataggcggctacgcggtggaggaccgtgacgcaaaaagagctgtatttgaaaacctacgataggaatcgcacacagtgcaaacggccatttggaatccgacgcggacacgcttgcggagcttgattctgtgggtgcacgcgtacaacagacgccgccaaagctccgaactgtggtcgccgtgacctcaataggcggctacgcggtggaggaccgagacgcaaaaagagctgtatttgaaaacctacgataggaatcgcacacagtgcaaacggccatttggaatccgacgcggacacgcttgcggagcttgattctgtgggtgcacgcgtacaacagacgccgccaaagctccgaactgtggtcgccgtgacctcaataggcggctacgcggtggaggaccgtgacgcaaaaagagctgtatttgaaaacctacgataggaatcgcacacagtgcaaacggccatttggaatccgacgcggacacgcttgcggagcttgattctgtcagtgcacgcgtacaacagacgccgccaaagctccgaactgtggtcgccgtgacctcaataggcggctacgcggtggcggaccgtgacgcaaaaagagctgtatttgaaaacctacgataggaatcgcacacagtgcaaacggccatttggaatccgacgcggacacgcttgcggagcttgattctgtgagtgcacgcgtacaacagacgccgccaaagctccgaactgtggtcgccgtgacctcaataggcggctacgcggtggaggaccgtgacgcaaaaagagctgtatttgaaaacctacgataggaatcgcacacagtgcaaacggccatttggaatccgacgcggacacgcttgcggagcttgattctgtgagtgcacgcgtacaacagacgccgccaaagctccgaactgtggtcgccgtgacctcaataggcggctacgcggtggaggaccgtgacgcaaaaagagctgtatttgaaaacctacgataggaatcgcacacagtgcaaacggccatttggaatccgacgcggacacgcttgcggagcttgattctgtgagtgcacgcgtacaacagacgccgccaaagctccgaactgtggtcgccgtgacctcaataggcggctacgcggtggaggaccgtgacgcaaaaagagctgtatttgaaaacctacgataggaatcgcacacagtgcaaacggccatttggaatccgacgcggacacgcttgcggagcttgattccgtgtgtgcacgcgtacaacagacgccgccaaagctccgaactgtggtcgccgtgacctcaataggcggctacgcggtggaggaccgtgacgcaaaaagagctgtatttgaaaacctacgataggaatcgcacacagtgcaaacggccatttggaatccgacgcggacacgcttgcggagcttgattctgtcagtgcacgcgtacaatagacgccgccaaagctccgaactgtggtcgccgtgacctcaataggcggctacgcggtggaggaccgtgacgcaaaaagagctgtatttgaaaacctacgataggaatcgcacacagtgcaaacggccatttggaatccgacgcggacacgcttgcggagcttgattctgtgagtgcacgcgtacaacagacgccgccaaagatccgaactgtggtcaccgtgacctcaataggcggctacgcggtggaggaccgtgacgcaaaaagagctgtatttgaaaacctacgataggaatcgcacacagtgcaaacggccatttggaatccgacgcggacacgcttgcggagcttgattccgtgtacaacagacgccgccaaagctccgaactgtggtcgccgtgacctcaataggcggctacgcggtggaggaccgtgacgcaaaaagagctgtatttgaaaacctacgataggaatcgcacacagtgcaaacggccatttggaatccgacgcggacacgcttgcggagcttgattctgtgagtgcacgcgtacaacagacgccgccaaagatccgaactgtggtcgccgtgacctcaataggcggctacgcggtggaggaccgtgacgcaaaaagagctgtatttgaaaacctacgataggaatcgcacacagtgcaaacggccatttggaatccgacgcggacacgcttgcggagcttgattccgtgtgtgcacgcgtacaacagacgccgccaaagatccgaactgtggtcgccgtgacctcaataggcggctacgcggtggaggaccgtgacgcaaaaagagctgtatttgaaaacctacgataggaatcgcacacagtgcaaacggccatttggaatccgacgcggacacgcttgcggagcttgattctgtgagtgcacgcgtacaacagacgccgccaaagatccgaactgtggtcgccgtgacctcaataggcggctacgcggtggaggaccgtgacgcaaaaagagctgtatttgaaaacctacgataggaatcgcacacagtgcaaacggccatttggaatccgacgcggacacgcttgcggagcttgattctgtgagtgcacgcgtacaacagacgccgccaaagatccgaactgtggtcgccgtgacctcaataggcggctacgcggtggaggaccgtgacgcaaaaagagctgtatttgaaaacctacgataggaatcgcacacagtgcaaacggccatttggaatccgacgcggacacgcttgcggagcttgattccgtgtgtgcacgcgtacaacagacgccgccaaagatccgaactgtggtcgccgtgacctcaataggcggctacgcggtggaggaccgtgacgcaaaaagagctgtatttgaaaacctacgataggaatcgcacacagtgcaaacggccatttggaatccgacgcggacacgcttgcggagcttgattccgtgtgtgcacgcgtacaacagacgccgccaaagctccgaactgtggtcgccgtgacctcaataggcggctacgcggtggaggaccgtgacgcaaaaagagctgtatttgaaaacctacgataggaatcgcacacagtgcaaacggccatttggaatccgacgcggacacgcttgcggagcttgattctgtgagtgcacgcgtacaacagacgccgccaaagatccgaactgtggtcgccgtgacctcaataggcggctacgcggtggaggaccgtgacgcaaaaagagctgtatttgaaaacctacgataggaatcgcacacagtgcaaacggccatttggaatccgacgcggacacgcttgcggagcttgattctgtcagtgcacgcgtacaacagacgccgccaaagctccgaactgtggtcgccgtgacctcaataggcggctacgcggtggaggaccgtgacgcaaaaagagctgtatttgaaaacctacgataggaatcgcacacagtgcaaacggccatttggaatccgacgcggacacgcttgcggagcttgattctgtgagtgcacgcgtataacagacgccgccaaagctccgaactgtggtcaccgtgacctcaataggcggctacgcggtggaggaccgtgacgcaaaaagagctgtatttgaaaacctacgataggaatcgcacacagtgcaaacggccatttggaatccgacgcggacacgcttgcggagcttgattccgtgtgtgcacgcgtacaacagacgccgccaaagctccgaactgtggtcgccgtgacctcaataggcggctacgcggtggaggaccgtgacgcaaaaagagctgtatttgaaaacctacgataggaatcgcacacagtgcaaacggccatttggaatccgacgcggacacgcttgcggagcttgattctgtgagtgcacgcgtataacagacgccgccaaagctccgaactgtggtcaccgtgacctcaataggcggctacgcggtggaggaccgtgacgcaaaaagagctgtatttgaaaacctacgataggaatcgcacacagtgcaaacggccatttggaatccgacgcggacacgcttgcggagcttgcttctgtgagtgcacgcgtacaacagacgccgccaaagatccgaactgtggtcaccgtgacctcaataggcggctacgcggtggaggaccgtgacgcaaaaagagctgtatttgacaggttgcagaccgagttggcgcaatcgcgcacgctggtcaacaacgcagcgccacggatggacgcccttcgcttggatgcgtccaaagttcgtgaggacgcagaagcagcacgacgagaagcggcggcggcgtcgaagacggcgcaagacggtggtaagtcgtcccaagtgctgaggttgttgatgttgcatcactaacgccttgatctccacagcgacagcgttatcggatctcgcacagcggcataaggtggctgggaagcgactggaggagttggagaggaaaatcactcggctgactcagcataacaccgttctacggcgtgagaacgtcgacttcaagaatagcttggaacatcgtcaggctgatctcgcaacagctcaggatcgcgcagtggctgcaggtcatgatcgcgcgtgcaaatgtggcgggttgactcttgtgctgacctgtgcgtttattactttgtagaacgagagcgagcggaggcctccctcgctcgcgacgacttgcaggcggagctagatgcgagtcgacagtcgctgctgaaggagcaggcttcttctgctgatatccacagcaaaatagcggagcgtgaggaacacctcggagcgttgcgcaacttgatcaatctggtacctgcgccgactccgcaacctgaggtggaacgatgcgtggcgtcggcctcttccagttcgtctcttgccacactggcgtcaacggccatgagccttgtctcctctgatcctccagcgcgaacatcttcgcagcagctcccgtctggctcggcaaagcgaagtggagatctctcttctgatccaacgtcacagtcgaagcgtgcaaagcgcgccgttgcgactaccgagggagcgccagctgagttggcttcctctacggcgatgcgtacgtagctcctcctcattgtcagacaagcgactttcatagatctccgtctgacagcccgtggatctctgtatcagcccgaagcccattcacgcacgcaattccacctgagttcagcgaagctgcgcgccctgccgatgtcacgccgtggctgtgggaggttgttgcaggtcaccgccttgacctgcttacagccaaagacatcacttcgaagttcttaccacacgactggctgctacccgccggggtgtgcaaccctaagaaggggaagctgtccgttcctgctgactatcggccctagccacaaacctcggtcgaagctttatacaaagcgagtccctggaagatcttcctggataacatgcccgacccagtctcgttcgacattggagatccccgcttccaacctcttctgaccatcatccgcgatgtgctgactcggaacgataatcgtggcgcgcttgtgttctgggaaattacccactccatcgagatttccatttccaaggccagcgctgagtcttgggaggtgaagttcacttcggatcgtaagaatcggagatcccactttgtgaagatgctgctgccggtgttcgaagaggtggcccgcctgtgcaaggctcatgtgtgcgacttggacattctcctggagccgttcttcctgccgctgatcgcaacgtacccgtggttccctaagggagcttctggtgcctctggagatctgttacacgtcttacgaacaaccgacgaggcggagccgtggcgcctgttctactggaacgctcgtgccaaacacccatcgatgaacggacccatccacacgcgccttcggggcaagttcaaggcgacctcgtcaatcgcctagcctgagtcagctgaacagacctaggaggacccccggaaatctccagcgtccgacatctcttccttcaccaatgtacgtagctagtgggtagtctcctcgagcatacatcttctttatcgacatcgtaatacaccgtcttcgactccatttcatataactcccgccccacaacttaattgtacactgtcaatgtcatgactgggagatctccccaactggagtgtgtgatgtgaaggcatgtcgtaggtcgccgtgcattctgggaagtgatttgtggtgatcaaggccatagcacaaactccaggcgtaggactgcacttagtccgacggccaccgaccacgccttcacgccctcggtgtctcctgcactgcggctccgggctggatctccaagtcggcggcgacagcgatccggccaaaatcgacggaacgcgaaagtagtctccgacacgaacggtgccggtttacaccatcgcacagacccagcgcgtcgtggcgagggcgtttcagcagccgtcggacgcgcgttcgcaccccaggtgcctccagcactgcgacaccgggttggatctccaaatcgcccccgagtactcgttcgtcgtaattctaatatccgaccagatcatcacaagtaacctcgtttctccattccatcgcgtgatcttctctccatttcttcttccactcaatcaaatgtaaatgtgcaacaaataccatcccgcgatcgcccccgccaggtgggttttcttttcccgtctagcagtcgacgcactccccgacatacttctgcacacttcggaacatatctcgccagtagaaatgcctccgaagcttttggaatgttcggctgacgccctgatgacctccctccacacttgtgtggagatgatgcaggagatcttcgtggagtgtactcggcattaccagtttcaccatagatccacggtcctcgacatcatcaccgcgcccctcgactggacagtacatcaagaggccatgctcgtcgacctcgtaactgtcagccagtttactgcacgtcttggcttgacggctcgagatctgagagagatcaccgtgcaggaaacacttcagtgaccagatccacacctcctcgtcttgagcacggcaaatacgttccaagcgcagctgcttgacgacgtcttcctgcaacacggctggtgcgacagtacgacatcggcttcgcgtgacagcgcctaccttcggatgggcgtaacgttcttcgcgcgtcttgaggagctcgtccagtcgattcaaggctcgaggtccgtgtaatcggtgtgactctcgacaactaccccggcaccacgctgcagcgcctgtcccgccagcatatccgcgggttggttccaatcgcgttttacgtggatgagttcgcattgcggccaagaccgcaaaatcactctggccttctcacgcaagagctggagtcccgatgacttgcgctccgtctctccacgcagttgacggatgactaaattggagtcgccacacacaatgagacggtcgatctggagatcggcaatcaaacgaagtccaagaaggaggccatggtactcggcctcgttaacactgaggtccggtaaatagccagattcagccttgacaaccttccatccaggagcatcccataccacagcgctgaaagctccaccaactcgtttcggcttggccggtccgtcaaagctgacgacgcaaacgttttctccgggcgtgaaagtcggcatcgggatagccaatgctctcgtcgacttcttctgcggagagatctcctccaacgctgcatccatctctgcgcgcggagtgatactggcggcaaccaaacctagtagatcatcttcgcctttcgttaagcgttcgatctctagcgaatggggggagagcagcgccgcccactgagctagccggcccttcaagcctttcgcgcggaagagccatgcgagagtcgtgtgtctggtgagcactcggatgtgtcgaccactcagcatggtgaagcagctatcgaggattcttagcatagccagtacttccttctccgcaatgtcgtgcccgatctcgtgagaccgcagtgtcctactcgtaaatttgacgggtacgtacactccatcacgacactgaacagagatcgcccacttgcttgcgtatacaatcacaacaggatccaactatggggcaaaatggtagagcatgggtgcgttgatcatcttgaacttcagggtatcgatggctcgtagcgcgtggccctatctcacggtcgcctcgtgatttccgctgacgtttgtggctcgacccttgatgaaatcggaatctccgaactcatacaacactgtggcatatactgcgagatcttcgatgaagcgattgtagtagttgagactgccgaggaatgactggagagccttaagcgttttgggaaacttcaacgcctccagacttgccaaatctttcggcttggtgaacaggccttcaccgaagatctgatgccccagatagtcgactttgctcataccccaactgctcttctccgcgctaatagacagatttcagcggtcacaaacctctaggagcttcttgaccttctcacacagttcgtcccacgagcttgtccaactaagatgtcgtcgatgtaagtgcgacgtcccagcaccgacggcagcgatcgaacttcagggacaccttcctcgaaaatgttgacgagatccgcgcgatcttgacccggcgagatccgcagcacgccatataacgcattgtcgatcagccgccgatagatttggggggcattcttcagaccaaacggcattcgcagccactcgaacaggccgaacggcgtaatgaacgcggagatctctcgggctcgatcggtcatactcaccacccagaacccactcgccatgtcgtgagaacagaaccacagcaaactgtcgagatcttcgaggaggtcgtcaatcaacggcatggggtagatcatcagtcgtgtcagagcattgaccagacggtggtcgatacagagtcggacgtccacgccgttcttcttgacgacgataacgatcggagacgcccaaggagaagtggagatccgaataatcttcgcccccagtagcccttgacgagttggaacaccttttcacggaactgaggcgggatccggcgacaacgctgagccaccggtcgtgcaccaccaacgtcgacgtcacagatcgcccccgtcgccgcagggggtaaagcatcccctttgccgatgagaaggtgccgccgctcccaaaatgatatcacgcagacgatcaatctcctctgctgtgttctcagttggatcctcgaccttgagatcttcccttttaacttctgccgtcagggagatctctggtaacaccgccatttccttttcgatgtcttccgcagtgagatcggccccttcacgaacatacttcgcttcatccatgtcggttgcatctccgccttggcttggttcgacctgggttactgggagcattccgctcaccggctcctcttctttctcgtcgtcggtctgccagtcaaaactaccccagctactagtagactcagcgctttcggacgcacagctacagctgtcgctccagtcgctttcaacgatgaccgacaacgtgcgatgaaccatttcctcggtgtattttggattgtggcatgaggtcaggggtatattctgggaacaccttgcggagctcggcctcagccacatttgccggagtcgacgcaaagcctaccggtgtttcgccactgttcgtaaaggataggccgctctcctcgcctgcatgagtttttccgaacgcggtagactggagtcatcgctgtccataccagagatcacctgaccggggtcggtagagatcacgtcctcctcggtttcggtcaccctagtcggatcagtcgaacttttcatcagctgcatttgaggatgtgtgtcgtcaagtgtgagtcgcgtgcattcttctgacgttgctgctgcttcaacggtcttcacttgtggaggccgtgctaaaatcgcagtcggagtccggtagctaggacgctcgaccagcggtctagactcttcaacttccgcttcgtttgcatctccagtgtccacagctgcttcgaacgcaagtgcttgccactcccgatagcggtttgaattcttcctagcgaatccaggtcgacgcgggatctgcccaacgggtaaccagattgccaaacgcaccaaacgacccagtaccaggcggctcgtgctgatgttggtgatccggaggtatgacttgttactgaatccaccattcaccaccgtgatcacccatttttcccctctcgttacccacagttcaaaccgcttgttgtgggacttgagtgagatctctgtccattggccaggaccgacttcatggaatcccgttgcgtaggccgcgtcagccttgctgctatacagtggcttacggtcggtcatctggatgtgaacttcgtccggcagacagagcgttccgtcagccaggtccaacctcacccccgcaggaaccataaagtccatgccgagaatgacgtcttgtcctgagagatctccaacccacacacggaacttgtacagccagagtgagcttgacttctgctcaaccttctgtgcggtgcccagcaccccccacaccaacacaattcattgtctgtgttgtatcaatttcacaacccaccttacatacaaaggtagagtcgattatcgacacttcggctccagtatcaaagagtaggacggcacggacattgttgaccgcaccggtcgccttcgactgcttgaaccacttggagggagtgtaatacttccagtaacctcggcgttcacccggcgacagtcgaagggccatcacacaagggcgacgcgaatagtcatcttcatccgaggtaagagatctgactgtattcaccgcattgcaggaagttgggtcttctaacgctcgcgccttcctctgaacatacgcataaatgcagaacttcgatcgctcgttacgtaccaggctgttcaggcctggcgagcggtctagtttaacgccttctcgacgctctcgggcagcagtccggcatggcgagttgggttgtaccattggcgaacagcatcgaagaagtcgccgatttacactgacctgcttcgtgaacgtctccacagcacttgcagacgtagaagcacttgtcggtaggatggtccatgcatccacacttctggcacgtgagcctcttccagcaccccagatccgtatgcttgcgagatccgcagtgtgagcatcgagtgccgtacttcggacgccccatttggtcttcgcggtcttggcgcgcccctggcttttcaccatctcctggtgtaggcgtcctagctgccgaaaacacgtgcgctctttcgtcttcagattcgctatcggaactgcttgattcgccctcgaactcattgagatctccgtgatctccgcggcgtccgcggccagtagtcacaacccgcaccgccctcgaggaggctgcaggggcgggagccttttggcggtatttcgaaccttgggtctcaatcttgtgacgttggtggcggcgtcgcctggccaacacaacgctttcgagagcttctgagtcaggcagcctcaacactaccagagatccggcgagatcgtcatcttggactgtatccatgtagtggtcgacgtgttcacgtcgttcttccttggtgccatcatggatcttcaagtttgcacgtatcccggccagattcagccggtataagtaatccagtgggtcttcctgactcccgcgccgcatgtggtagtacttgcgcgcgagggagatccctttaccgcaaaagtggatctggaactgttcacccaggtaagtccacgacgcgcaagcggtgcggctcagctggtaataccaattgcgcgcagggcctatcatcaaatcggcaaatgtcaagcacatctcgtctggctgcatccgatcccgtcggaaagccgttctaaccttgttgaaccagactcgggcggcttcttcgtcatgttccttgccgctgaagttcttcagttcggacacagccgatgctcgcaacctagtcgccgtggacacagctgcgacacgacctccggttccgccacctccatcatagccgaggtcatcgaataggtcatggagatctccttggtattccggttgtgtctgggatcggtacccgatacgtggccgagcgggagacgcagtgactggttgcatctcaacgtcttcaggctcgtctcgctcgttcgcaaactggtaaagaaggtcttcagccacaccgccggggcgatcgggctctgttgcaacctcttgagcttcctggatcctcccacgtggtcctctcgctgggcgagtctgcacaatatttgacacttgcgcagacttcccgcgtcctacatcgtttgcagcgatcgctgggaccccttgcgcacgttgttctcggcggggcacaggtggggccggtggaggcttcttggttgaggtagtgctcctcatgagagcgtcaccgtcatcttcaaacttgaaggagatccgcgaatcgtccaaccgaggaggtgtgaggtctccggtcggcaacggcgcggatgagtcatctgcactcgggacgagcttctgcaacactgtgtacacccgcgcgagcgtaaggacggtagtttccagatcgtactcgcgtacatcggtggagatccgctgttcatgtaccttgaaccagcatcttcgagcacgcagaacagcatcgtgacggcgtgaagcggatctcggattgttagcgtgcgcgggttgcgaactggacacgtgagaggccatggcatcgtcagccccaacttacgcaagagcggatctctctggagcaggaacgcaagctcttgacggaagtagttgacttcggcttcacgaaatcgtttgtcttcatcgtgagtgtcgttgctggggccatggaccgcttgcgccgagatctccaatttctccgttttcttctcggctttctccttcgcatcttcgacttccatgtagtccatcgcagcgtctagagcatcgcttcgggcagcgaggtcgcggatgacccctttcagatgctcgcgctccaggtttcgacctcgcttttcagcgacgccggggtcccgcttagcagcaggtccaatggaactcggtttttggaccgagtcccggacggctcctttcggagccttaacggggaacttctcttcgtaaacgaaatcctacggcccaggcgtcgccattgcctgtccgtcggtggacctagtgttttcacgtttaacttccgccggtcccagcggagttccgtcttccttcacctctcccttcaccttcacgtcccctttcggactagtagacccgggcacgcgcaccattgtggtggagtccctcagataaaacctaataaactcccacacgtgtcctgccacgcaactacggggggggggggttacccctgcaagccaaatacccaaagacaacgagaactagtcccgagatctctaggcctcaccttgtgtagcaagactcggatctttatctagcgtaattcctagaagacgtgtaatatgaaggggtgaatatggggttccttacactcgcaggcagagacttaggttaactctgtcgcggatgcacttgtacagcgaggtaactcttcccactgtacgacaacttgttgtacaatatgtacgagatctactggagatctcctgccgcagctagtctgcgggtccaaaccaaagtgcgagacgcacaccaataccttactaaaccgtttagagtgtcctactgtcgaacactgagagctgatctcctgagtccagacaatgcaacacactacgctactagaaggttaccaaggaggccaaatcaatccagaaccccgagtacacttcgcaagtaggtaggaaacagtcacagtacacacgtaggcgctaaccgcacaacacaaagactaatatgaagaagtaccttgtctcgttgttggaaattctgaactgaacagcctgggtttcgtaatcagtcgccggcctactatacgggacgccgagctagggcgtcccataattcaagtggctcactctcgggtcaccttcgggtaccctccgggtccatcgcctcacaatccttcaacccgcattacgacacctccctcgcacgaagttgctcgagcagcgtagagcagaagtcgtcctcagcatccagcgacttaatgcgaggcgaaagcgttgggtcgggtcccgtgatggccacagcgctgaattcaactggtcgagacagagcgtcagcgaccgtatccgtgcgcctcggtttgtgaaacaccttgaacgtaaactggttgaagaaatcaagccatcgaagaagcttaggcgatggcgtcggcttggtgaagaaccagacacaggccgaattgtccgtgtagaccgtgaaaacgttgcccagcaggtagacacgccatttctccagacagaacttgacgccgaacagttctttctcatgagccggccaacgcttttcgacgttgctcagtttacgactcaaaaatgccagtgggtgctccacaccatcgaagacttggctgagtacgccgccgactgcaacatccgaggcagccgtggtgacgaaaaatggcagcgagaaattggggagacgcagaacaggagagcgttgtagcagtgaacgcacatcgtcgaatgccttgatctcctctgtaccccagcgccatcacgtcgtcgtcttcactagctccgtcagtggatacacgaggcctgagtactgagggatgaatcgtcgatagtacccgcacaatcccaggaaacgctgcagctccttgcggttccgttgcggttgcatcctgctcattgccttcgtcttcgacgggtccaacgtgattgtcgaggcagaaatctggtgacccaaaaacacaatcgatcgctgcgcccacttgcacttctccttgcgtgcgtacaacttggcctcgcgaaggacgagaaacacttcacgaaggtgcacaatgtgatcctctagagtcgccgagaacacacagatgtcatctaggtagacgacgcagaaggcttggaactttgggcgtccgagtaggtgccgcatcagtctggaccacgatccaggcataacagcaagtcccataggcgcgacaacccattgatatagctcaccgttggcctggaacgccgtcagctcgcgtgcacggggttcgagcagcatctggtggtagccggacatcaagtccagtgtcgagaaataagctgcaccgctgagcttgtcgaaaatgtcgtccacccttgggagaggaatcttgggaatcacactctgcgaattgacatgccgataatcgatgactcagcgaatgggtacacctgcatcaccgctgcgtagccactctgctcgcgtcggagcctcgcctgtcgccgccactttcttcggaatggcgaaaatattggagacccaggcggagttagactcctcgatgttgttctttcccagcagctccttcacgaacttggctagctctcgctcttcaatgcgagcatgacggaagggagatcgggccgaaggtgttgcgtcaggcttcaacacgatgtcgtgctggatttctcgttcaggtgggagctcgttaggaagcgaagatgggaacccgtcgtcgaactcgttcaagagcacgacgacgtcccgtggcgttggtttcggtaatacgcctattccagcactagccgaaaaatctccaggtactcgtggttagcgagacgttctcggaacgactgcagcgagacctccactggtgcgagtagcttcttgctgcgacagagcacaggatgtatgtgctcgtccgagccgatcggccaacccttgtcctcgtcctcatcaggaggtggcggtggttcttggcggtccgcatgccacgtcaatgttcgcgtgggccagtcaatgttcggattgctggcttcgagccaggggcggccaaggatcccgtcataaccatactgtagcctccaaaacacgaaaggcacagtcacgaccgaactgctgcatgtcacctccaggtcggcgatagctacattccgctgctgtgcacggccatcgaatccgcgcgccacgaggttcgtagtctgcattcctgcagtgtcaaaaccgcgccccgacaacacgcaatgtgacgcacccgagtccaccagcatggagcattcttggcctataatcgtcaccttcaccaggaaaggagtcgccgacgtcaccgctctgggtgtgaccgacatttcggtcgtcgacatttccgccatctcgatgacggtagtacagtaggagattcaggactcaccacacgctcgacggatactccatttacatccgccgagctgagtcgtttccctgatgctgttgtccacgagcgggtttgcgatgaggacactggccgatgcgatggccactgcccttgcagtagaagcacagattttgacgcctgcactgctccttgcatatcgagcgagtgtcaaccgcggagacatccatcggagttggcccatccgtagctgcacgatgcgcattcccgtggttccttgagttgctggaggctcgattgcggtccgacgagtggaaatgagtgcgctcaaatgcttgagcagccgagatgacttcagaaagcgtaccgcagcgcaggtacatcatctctttgcgcgtctccgacttcaggccgtcgcaaaatcggtcgacctggtccatagcactcatgttccgtatttgagccatgagtcgacgaaaatcacgaacatattcttcgacagaactgcgctggcggcaagccttcagctctgcacgcagacgaaactgctagtcaggaggcacgaactcacggcgcagagcgttggcgaaggagtccacgtcgttgatgcggatgtggtcgatcgcgacttgggcatggtaccaggatgcagctccctccctcaggttggcagcgaggatggcgatcacgcgctgctggctggaggcagccgtgtagtcaatgcactggccctccatcaatagcttcgctcggaaaatgaactcgtccaccgactcggtcggtttcccgtagaaggtcggcatggtaaccccttccagtcggtactctcgaggtggttgaggaacagacacgcgttgctgcagctgctgctggtaggcgtgcagctgagcctggaaatcttggtacatccgagcgttctgctggctcagccccacagcaatacgatcgatcgcttggacgaaatggtcgaacgggttcggggcagcgcctccggcggttggttggtcagcgcgctcctccatcgtagaggcgacggcggcagtagacagtgatcacttggaccttgccaatgaagagcgcggtcgggaagtagcagtggttcccgaagcttgtgcgtagagagtcgaccaggagaagaagcagatgtgtcgtaccctcacccacaacgaagaagtgctaccaattggagtgaaccacttgtacttgactgagcaaaagacagaatgccattgaattgaggttagcgagtagcaacaagtaccggtaactagctctgaggggtctccagagggagacgctgctaatgcaacacgaaagccaggttgaagcctggtacaagcagagattcgccgagcacgaagtagtgacttggagcggagttgaacggagactggtccacgtctctggagcagagtgactcatctggaggcgagcttcgattggcagtgcgtcgacacgggaaccgctgacgagatcgatgtcgagacgggcgcttgtccacgtagacttagaccattacagcggaggtcggtcggttggttgtggttaattcaaaagcgaaggttggaggagacgacggcggtggtaggatggcaacctcatgggatcgtggtcgaccggaggtctacagctaagacagcaacctatctgtgagcaacttctcgggtccgagtctaaaagtggtgtagacgatgtatccgcaggcatcaacaaactaggcacttggtacataaacaatcataagtacctaaatggagttttcaaaatgtccttgtttaagagaatggcttcaggctcggttcaatagtaaatagtggcccattgatggttatgtcgttggtacatgtatttctcggtgcttttatcttatctagcgcagtagcaactggactagaactactagaaccactcattccgtcgccactacattaaccgctgccaccaccctcctcccgttactttcgtctctatgccttcaagcttcgcgccaatataattcgtgccagctcgacctccctctgctctgtgcatttggcacgccagtgaagctctcatacatgacagcgcattccgtgacctgccaaattatgagatggagctgggtcgaccaggcaatcgtaacagaccaatataccaaagcaagtattttaaataataaactaactacatgtaacctggcaaccgacttattatcaaatctttgttaccttacattggcttgtggataccacagaacgagcaaggagcagctacactgtacctacgctctgttgtgcatcatggaatttatcagatattatgggtaacaacagctctctagcttggtggacctggcatcaccaccacacagactgaaattcttgatcgacgcagtgtcgggaccacccgtgaattagtctcggtgtgagaacgattcacactcggccccatgaatatatctcttgccaggaacacaaacactgttgatagcgacttgaagaacacattctctaaatcatatgcttcacttgccatactaatatatagatctttgtatggtgcctaattcaagatttccaaagtgccgatttcaagtccaaatgggcattaggcacaatatcctagtttgttgatgccgtgtgtccgagctgattcccattgttgctactggatcggctgcagcaacataagtgacgatacttcaactttcaaagttgcacttgtttttacaatgttcgtaaatgattcatccattctatatggatactccgtcatatagggtacattcattagatgccaatgacgtgacgcaaagataactgatctctcgatactaaatccatgtcaacacacgtcacagatttattgcgtgacgcgcatctttgcaggcagagtggtgcccacgggctccgatcattgtcgagccccccgcaagaccgcacttcatcggcgtgctgtttctgcagcgctcgacccgcgttggcctcaccgctcggttgccaccacgttggctgcgcacattctcaacctccaagggctcctacacccatgatgtcccgacagaacctcgcgttgttggtcgaggtcctgctcgcgcgtgccacatcccgacgccctggctgtcggcgactacgagtggcgcacgtttgccgagttcttggaccacgtggatgagaccgcggccggcatgaagcgcgtgctggggctcaaacgccaagaaatggtcggagtctttagccgctcgcagtacgagtggacgctcgtggagcagagctgcaaccgcatggcctacacgctcgtgccgctgtacgacacattgggacccagcacggtgccgtacatcctcaatcataccgaaatgcgcgtggtattctgtgccaaggagcaggcggcgatactgctgcgttgtttaccccaatgtccgcacctgaagacaatcgttcagtatgagggcttcttggatgaagagcaagtggcggaagcgaaagcgcgtggagtgaagatttggacactggaagaggtcgtggaggttggcaggattcatccagcggaagcggacccacccaagcccgaggatctgagcaccatttgctacacatcgggcactacggggacgcccaagggtgtgttggtcacccacgccaactttgccagtgctgtgaacgcgtaccggccacaatcagggcgaaccgcgacgacgtgtacttcagcttcctgccactgccacatgtggcggagcacttcttgcacgcgatgatgatcacggaggaagctgccattggattctaccacggaagtgtggcgcgaattctcgaggacgtgcaagcgctgcacccgacggtgttcgtagctgtgcctcgactcatgaaccgcatcttcgaccagttgaagcacgaggtcgccgcaagcggaaatgcggagcagattgagtatttctaccgcgctctggaggagaagaagcgattgagtggtctgaagcacgacaagttcgacgctgaattgttcgaccgcttccagcctgtattaggcggtcgtgtgcggcagattcttacgggtgccgcccccatcacgagtgaagtgaaggagttcttccagtacgtctttggtgttcccgtactagaagcctatgggattactgaggcatcgggcggcgtcgcctgctctagtgcatcgatgccccaaggccctcacgtgggcgttccgcttccaggccttgccattcaacttgcagatgttccagagatgaactactcaagcgaggatggccgcggcgaagtgctcatgaaggggccgaacgtgtttcccggttactacaagcagcccgagctaacgcgagaggtcctggatgctgatgggtggtatgccacgggtgacattggccgctggaatgccgacggtacgctgagcatcatcgaccgcaagaagcacattttcaagctttcccagggagagcacatcgctccggagaaagtggagggcgtctaccagaaaagcaggttcgttggtcaagtgttcgttgatggagactcactgcagagctatctcgtcgcggttgttgttccggatgcgtctgttgtcgcgcactcgccattcccggactgggagacggatgaaaagcaaaggcacggactggagaaggcagtgctcgaaaacatggacatcgtagcgggtgcggatggactgcacggcttcgagcgcgtcaagaaggtcttcttgactactgaggccttcacggtcgagaacgatctggttaccccaacgttgaagccgaagcgcacgaatctaaccaaacacttcgctgatgtggtgaagggtttgtacgcggaaggtctgcagcactgaagcgcaagtcgttgagaggaataccgtaaaagcacaaatttaaaacggattaaaggtgcagcagtatctacttgaacaagtagggccttgctgggactgttgaagcgagattctcccttggtactgtacagtgaatatctctaccgacctcaacgaaattggcgctattgcctgtctgtcggatgcgtgtttgaactcacgactccaattgctctcaattctgccaatcatccggcgatcgatgcaaaccgaaacgctggcaggaataatcatcggtcctgtggtcatcatcgagattgcacttgcaaatccttcaacatgctcctctcgccagtcgaattcctgtcaccgcactccaattcacttttcaatttgctctccccaagtaacgcaacactatccccactcactccatcaactcgcagacccctgtcaagaactcggcctacccatgacggtgccgctcaaggactacacgctctttaagccctaccagctcagtaaaaacctcgagctcaaaaaccgcatagtcatgtccccgctcacgcgcgcccgatgcgaccccgtgacccacgaggcaggacccatgcaagtcgagtactactcgcagcgtgccggcgccggactcatcgtcacggaagccgtcgccgtgtccgtgcaaggcttcggatggtacggcgccccatgcatgtacacggaggcccaccgagactcgtggaagcccgtcgtggacgccgtccacaccaaaggagccaaaatcttcctgcagatatggcacatcggccgccagggccacccgagcttcagcggagacgtcgtgggaccctccgccatcgcacctgtgtcgggccacacccgcgacgtgaacgccgagcaagctccgtacgaagtctgccgtgagctgcgcaccgacgaaattcccgagatcatcaacgacttctgcaaggccgcgcgtctggccaaggaggccggcgtcgacggcgtcgatatccacgcagccaacggatacctgcccgacacgttcctgcagtcggtcaccaacacgcgcacggacaagtacggcggctccatcgagaaccgcgcgcgcttcctgctggagctggtggaggcgctgcagaaggagtggcccgccgaccgcatcggcctgcgactgtcgcccaacggtttctacggcgacaccggcagcgccgacaactacgacatgtgctgctacgtggccgacaagctcagctcgtatggactcgcgtacctggccacgctggacggcttcggcttcggcttccaggacaagggcccgctcaccaagcccttcgacgtcaagaagaacttcaggggcaccgtcatggccgccaacagctacacgcgcgacacggccgagggcgtcttgctcagcggtgcggccgacctcgtgggcttcggccgcccgtacatctcgaacccggacctggcggagcgcttcatcaacgactggccgctgaacgcgccggccgggtacgacacgtggttcggcacgcgcatgcccggtcctcgcggctacatcgactttacggtgtacaacccggactcgaagtgatttgaatcgtgacgacagggagatgaagttggaggttcccgatagtgacattgtctgttgagaaaactaaacaagcgaagctgtgtcgatgatcgttagggcaggatagcactaagtggacgcaatatacctcgtttgaagaatgaaaatgaagctgtgtcgatgcaagtgaaaaccgggtcctaatcgccaagtttcattgcgtatttttcgcccgtaccatttcacaaaatctaaactgagagtgtacttaggtaagtaaatgtttgaccaggcgacgaaccttcgactgtgaaggcatgggttaatttaccaaacacagttgtgaatcgagctgggcgtcatataaatagtagttttcggcttgctcgtgttcaggcgtcgtactaagagctggctgtgtgtgctatctcgttgtttttgggccccgtgtgcgctgatgtccgagctccaagagcttccgaggctgttcgaccctccaggggcaatacgtcgacagtcctcacgccgccttctttcgcgcggcagcatgaggcgaatgacgtcgcgtcacgggactgttttcaagcctgaagtccctcctcacttgcagaagttactgcagaaaacgccggaagagcagcagcgcgtcgcagcagctaaggccatcctcatggacgaacccgcattgcgaaacgaacagagcttggacctggtctacagctggatgctgcagaactgcaagcagtacagcaacaacatcttcggtgctgcgccagaatatattcgacgtgagatttgtcgccagatgaggctcatcaaggtgaaaagtggaggcctcgttatccgtcagggcgacacaggagatagatgttatattgtcgtggacgggttggtggacgtttacattaaggcggagaagccggtcgatgctgtcgtggccccgacttccccacctccaatgctttcggtaatgaagcagcgacgcatgtctcggcgaatgagttcggaagctaatgcagcaccggtggacttcggtgccatggtggccaatcttggaccaggagcgatgtttggcgaaattgtgctgctgaatccctctgcaaggcgaaatgcgactatcaaagcttcacaattcacggaaagctgcgatttaatttgccttgagcgcgcagattacatccgtctcgttcgaacagcatcgatggaagcttcgcactataacaatgcggaggtgctagatcgaatgttcctcttcagagactgggttaagcatggtgagtaaaagcccattgttggtcggacgtggtatttgatttctaacataagttttgctaagaaaaaatgcgcctcgtaagtgcgatgaggtcacgccatttcacaagcaacgtaagaaaggcatcgttcccaccaaacgagatgacttcaccgactaattttaatgcgtttgctttgtactttcgacaggattatctgtaccgagctggaacggatgccaagtggatgtatattataacagcaggagaagtcatggagcgaatcaattggactcttgaagcagcagggaatgacgctacaatgcgccgtcttctgatgtcccagccctcttcacgcaagaacccagagaaaatcgtaaatgttgagcttactctaatcggtcctggagatatcgctggcgagctaccgtttattacctcaaagcgtggggcgatctttgacatcaaggccgtcacggatgtgcaagcactagctatcgatcgacgatactatgaaacggtgatgctgacggcaacccgagaaaataagcccgaggtccatgcaacaatgaaaaagttgcggaagttcagtcaagatcgcgaagattggcgccagcaacgaatggagtgcgggatttcgtacccgagcgcccatgttaatatgtgagtttactttcctcagatttattgcatcaactaacgagtgtatactaacaactatctacagcacgtggcatctgatgcggatgtcgaatgttccttgtccaagatgtggccaacgaggtcacctagctacagatatctccaagtgcgacagcgctccaccccgccaatctccaacccccaatagcagcaacggtaggactggagcaaagcgaacaccgtctcgcggcatgcttccgcgcaaagcttcaacagcacgggcaccaccattgagaatcccaaggcatgctttgttgtgatgttccattgaggagtaagaggtttctgacatttctgttttctttattgtggttctagaaccgatgatacccatcctaatacagcacgcccggataccgctcttcgcaatctttttgacgattcctatctcccctcaggaaaagaacagcttcagcattgtagagataagagaatgcaattgtagtttgcgcgtggttagtgtgtgaggaaattatcgcaataatacgcttttgtatcgacagcattagtactcagctgttcaggtagctccgttttcatagctacagagtacagccctgcggctgcaccagactaatcactggagtcgcgccgtcatccactccacaaaattgttcagaatcttctcgtatccctcaagattaagcacctcgtgcaacgcatccggaacgatgttgatggtcttgtccttctgcgtgcaggcggtgtagaagttgatacttccctgaggaaacgtaatagtgtctttctctccgtggagcacatacagcggcgccggaaagttcttcgccagctcgttgtcactttgcgcgaaccgatctccttcactcaggagactgtacatgagccgcaacgtagatccatgcttgggcatcaactcatcccgcgtccagcgtttgtacacttcgtaatcgttgcccagtttcgggaactcgagccccaggacgtgcatcctgggcagcatccgagcgagaccccccagaaagcccgcgacacctccctccggaaccgtccagaacggcgcagaggatacaatgaccccgttccagctcagtccttgctgcatggacagctccacgagctgcagcaccagcactccccccatcgagtgaccgagcacgaatctcggcagatctttccacttcacgtcagcgtgcgcctccagctcagggtccaccaccggggcgttcttgctaccaggctcagggccgttgagcacgtgttgcacgaactccatgaagtccttggacaggtcccgcacctcgttcgcgtacatgcgctcgccgtcgctcattccgtggccctggtggtccaccatgaagacggcgaacccctccttggccagcgctctacccacgtggtcgtagcggcccccgtgctcccccagtccgtgtagaatgaagaacacgcctcgaggcgcgcggtcgaagcgcggcagccacttgtgcacataaagcgccaaaccgccagacgtcacgaagaaccgctgcagtacgtccacgtgacccggaggggggcgaacgcccttgggcacgggtgggaactgatgcgacgcgcccgacattgcggcggcgacggaggatacgagcttccaggcgcagaagaccagcgccgcgtagcccagcagcacgtcgacgctcaccatgctgggcggaatgcggaatgcgggatgcaatgtaaagtgtagccatcgggcaagtgataggacatacatgacgtaattaccgatctagtagaataaaaaggcttagactttgtaaaactataaagattcaaagacacacaatttacagcatgaccatgtctcttttcgcacttagccgcctcccatacaatcgccatgtgtcgagcttgaagtgcgcacgtcgggttccaagcagaaccgggacgtttaacgcttgaagcaggaacaaatcttcgtgtaaacaacagccaagagtctcccaggggcccattccgcattccgcactgtgcgcgtgaccatcactctcgcctccccaaccgttagcagcagcatgggcgccgccagcagcaccgagcgccccatgagcgagatcgacttcgactcgtacacggggctgcgctacacgacggccgtgcccaacacgggcgacgccacgcacggcccgacctacgaggtgcccaacacggtgcccgtggacgaggcgcagcagacgctgtaccacaacttcctgcgcggctggagccgcgagggcggcgcgcgcccctgctacggccgccgcgccgtggacccggccacgggcaaggtgggtgcgttccagtggctcagctacgacgaggtgaagcgtcgcatggacgacctggcgtccggaatgacgcgcgcgtgcggtctccagcgccaggagaacgtcggcatcttcgccaagaaccagatcgagtggtgcctcgtggcgcacgcctgcgaccgcatggcctacgtgctggtgccgctctacgacacgctcggacccgacgccgtgccctacatcgccaaccacacggagctgcgcgtgttattctgcggcatggaccagtttcacgtcgtcatggactgcagagacgcctgccccaagctgcagaccgtggtgcagttcgagcccgtcacggaggagcagcgccacgtcgcggcggccaagaacattgagctcaagagtctgagtgatctggagctgattggtcgcgcggagccgctgcctgctgacccgccgctccccacggacatctcgacgctgtgctacacgtcgggcacgacgggcgaccccaagggagtgatcctgctgcaccgcaactttaccatcatcagtgcgctggcaggagagagactaagtgtgtgtccgacagacgtgcatttgtcctacttgccactgcctcacgtgttcgagagggcggtgattggatctattctgcagaatagcgctgctgcgggcttctaccagggagacgtgctgttcctgatggaggacctggccgagctggccccgacgctgttcgtatcagtgccgagactgttcaaccgcgtgtacgacaagatcgtccagggagtggcagccgctggcgggttgaagaagctgatgttcgaccaggcttatgctagtaagaaggcggggctaagtgctgggtacaaaacccacgcgctttgggacgcgctgatctttgcgaagatccgtcaagttttgggaggacgagtcaggtgcattctgtctggatctgctccgctgagcgctgacgtcaaggagttcatgaagattgtcttctgctgcgatgttgtcgagggatacggactgagtgagacggcggctggactgtgccttgcctctggtgacatgccgttgggcccccatgttggcccgccgcttgttcgtatgcaggtttgcctggaagacgtgcctgaaatggggtacaccagcaaggacaaacctcgtccgcgtggtgagatcctcaccaagggcccgttggtgtttgccgggtactacaagcaaccggagaagacggccgaggtgatcgacgagaacggctggttccacacgggagacattggctgctggaacgctgatggcacgttgagcattatcgaccgcaagaagaacattttcaagctctctcagggcgagtacgttgctgccgagaagatcgagggagtgtacctcaagagcaagtacgtcgcgcagatcttcgtgtacggagactcgcttcagagctgcctcgtcgcaattgtcgtgcctgaccccgaaactgctgaagcgtggggccactccaagggattgtctggtgagcacctcacagttgctcaactggtccacaacgccgcctttcagaaggaggttatggaagatatgcaggcgaccggaaaagaagcccagcttcgtggctttgagtttgtcaaaaaggtgcacttccacccggacgctttctcgatggaggacggcctgatcacgcccacgttcaaattaaagcgtccgcagttgaaggcgcgcttccaggcagagatcaaacacatgtacgaggagctccagtaacgcacacacaagaatgcgaaaatatcggccggcaccacccagttgaaggtgtcggcaaggttgggtctaatacatgtcttgaggttaacagctactgtcatatcttctgtctgctgcaactcaaccctgtcgtacttcattcatgttattaggcgatgctggcaccagcctgtattttggcttgttgttttggcgagctgtactcgaggatgccaaagccggccatcaccaagatcgctccgagaagacactcccaggagaacacccggtggttgatcgttgcgtcccagatcaaggacaacgggatcgtcatcatgcccccccacactcgttatgagcggagtcgtccagcacatagcgaacgactgcagtacggtgaaaactccggccagtgttccactcacgacgagcaggaagaacccccattccgtgtccggcaaccccagcggctctaccaatgcttcaatggggcacaccgcaagcaccaagcttccgacaacccagactggaatcgtcatcaatccgcacaaacccgtcagggttaaaagcgttgatgcgtccattgcaccttcgccgacaagcacgcagtacgcgacttggtatcccgacacgatgatagtcgcactcagcaccaatgcacaagctaggaagcttgaattttgagagctttcgactgcgccatcttggtaaacggcaacaagcgcgacgccaacgaacgagacgagaactccgatcagttttttccagctcgctcgctcgtggagaaaacacatcgagaagagatacacgaaaaagggagacgtgctgccgatggacgtgcccgcagcgacgctgatcatccccaaagcggcgaaccacatgtagtccgcgatgaggtagacggagttcagcaccgctgccaatttcagcagtttgcgcacaggaagcgctgagtgtcgttgcagcacgtcggcaactccccacttgtcagtccgtacgccagcattgtactcgctcactcggtggaagaggtaaattcctggtagaatcacgacctgccgtaagcgaagagtaaatggcaattccaggggtcttctaatggggaatccgcacagagatgcctaccgtgatggcatggtccaggcaggtgatgaagaatggcttcctgaagtgacttgttgcctacagtcgataacgatgttgagttagaaggttttgcgtgaatgcaattagcagcaacaaagggattcacctgaagggcttgagacgcttccgcctgagtgacacaaacccacaccagcactaagagagtcgtcagagccaccacaatcgagccaatgctggaaaacgctgctacccccgtaccaaagattgcagccaaacccaaccggtggaagtaagagctactctgctgtgccttgccggatgaatgcagaaggggcgtacgctcgtttgacggcgcagaaacctccattgatatcgctgccactacggattgggtggcttgggccaaggaaatcttcaaatgaagaatctcgaacggtcatatcttctccactgtaccctgtacttgaagggattcatccttgatgagtggctactcgcgcacgcattaaacgtcaaacaagcgtcggttaaagcggaaacagcctctgcttggcgtcagagctgcatcctgggaagaattttcggctaaactcacaacaacaacaaaaaagctgcagcccagcatattttattgcgtggatcgtggctacagcattcagttacaactgaatgttacaactgaatgctgtcacgcgataaattgcagcttttgattgactttgattcgtggatgaagatatacggcttacttatggtgtaagtggggttgctctgttaaatcgcaaagtcacgcttatactgccgcgcatgaaaatgaatgagcaagcatgaacgagattttgctatacccgcgggaacaggtaaccacgccgcaaacctggttatggcaaactgcgtgcaaaataccgctggcgtcgagttagcgcaacttcaacgctgactcacgccgtcatcaatgctgtgtgtcgacgaatactgtacccttttgtcgaccttggaggcacgactcacttcgagtttcgcgcggcactaacaagtaccggcgcgatggggtgtcgcccgatggttttgctcgacgctggcgaggccaaggagcttgtgcctctcaaaatgctcttcatggtgcacaactactgttattcactggtcgcctaccttccagtgagttgtgcagctgtcgacttgcttgggatgttttgttcggacattcaccatctttgtgttgatgtagattttcttcgaggactcgaacttctcgaagagtgaaattggcattcttctcgcaattccacgcctctgcacgattatcgggccgccggtctggggagcaatcgccgacgtacagcaccgccacaaggaagttcacatcttgtgccacatttcatcggcattgttcatcttctcgatccagttcgtgaactcgttcccgctcatgtgcgtcaccgtgttcgcggtctactgccaaatggttccaactctggcgctgctggatcttgcggcgatgaagctcactggtcgctatggaggtgactatggcaagcagagactttacggagctttcggatatggtgttggcggctatatctccagtatgatgacgtcctcgattggaatcaaatggtgcttcacgatgatgcttggggtgtcctgcatctctctgctgctgttgattttgtacattccttctggctatggagatgatgcagatcaaccaagacaaaaggggcttcttcgcagcagtgtgaagcatattgggcaacgtcctgatgtgctcgtattgtttgctgtagcgctggtgatgggcattagtggtgggtttatcgatagctacctctttttgaacgtgtacgacttgtcagacgacggcgctacgatcgtcagcgtgtttgtggcggtgcagacactgtccgagattccagtctttttcctatccagtgcactgatcaagcgattcggtgctgcggtttgcctctccatcgtcgtcgtcgccttcttcactcgcgatatcgtgtacgcctacatggagcaaccatggttcatcgtgccgctcgagctgcttcacggagttacatttgggttgttactcgcatcgatgactacttatctcttcgacgcagctccgaaaggagttactaggactatgatcggacttctttcagccttcttgcgtggtattggggcaggcattgcatctctcgtcggcggatatatttgcgatgaatacggcgtgcgcacgatgtggaagatcggtgcgtatggcctcgttccagcatcatttctacttgttggtggttttgcgtggctggctcatcggcataatgcggcggagagagaacttgaaaagcagctcgtcgatgagctcgaatccccgatcgagatcaacaaggtatcaccgcagcaggtttgaataattaggtgacacaagattggactataggtcgttcttgagttaaatcgatacagagcgatgctggtgggcacaacgtaagatacacattctataatactacttccgtaattacatttttttctcgctgttgtctacaacacgaataactgtgccgtctcttcacgtcaacttatgccgaaaaataacgtaggggactgcagtaaggcacatttgttattggacttcgttaaaacgattcctaatgcctaatatctgcaccatatcaagctgtccgtttttgcctactcaacgtcgatcgagtccatcgcagaagcatcttgagacgtatagacgttctcatcgaagatcatcgctccagcggtcagtaactccgtaacattaccggtggatccgccgttcaggatgtcattgatgaaatccagtgcataagtgacgcgcgcgtagattccaggcaaaacaccacagtcgtcggccccggcgctcacgatgcccaccaccacctcaataacaacaagggggccacctgaatcacctgcgcgcgagtctttgccacctcctgatccggcacaaatgacggagtcgtccacgatgctttcttcccccatgtatagtttgctgcacttcgtgttcgaaatgatgttcacgtccacggctcgaagtgtttcactcaaagtctcgttgtttattaacccccacccgagggtggtggccgtattgtcaggcttattgttggatccgtttgcgttgggcaaaagcgcgggggaataagtggtgggtctttccagcttgagcattgccacgtcgtgggtccctgccgatatgttgaagaggcggtattccgggtgacggaaagcctcgacgacacgaatttgttcggactttcctgagtctcgaccagatctatgcttcgatccgagggagacgtacacgtcgtacaggtaccagtcggtgcaatgagctgccgttagtacgtactgcggggcaatcagtgtgccaccgcaaaacgtgccactgacggagccgttcgcgcgcagactcgccatgtacgggtagttcttgaacttcgcgctcttgccgccgtagattcgagattcttcgtctgccgtcatgtcggtgccattgttgggggcggaagccggggccgctctcgtcatatccgagaaggagtaggcgttcacaattgccatcattaacatggtacacatggctacttgatcgaacttcatggttggagagaggacgccttcagtgagaagctggaaggtaaaaccaaaatgatctcgtcaaagaaccaatccaggaccacgagtccagcccctggactcccggcgtgaccatacattattgtacagtgtactgcaccgtacgtattacatgtacatgacttgagtatctcacagtgaatcactattatagggccaatcatccacaattgtagcatctctttttagtcattagtaatggaaatgtatacagtattaatacaatgactcattcattacccaggcctcccaaattaaggcaaattcctcgattccctatatcttttaaaaggtaccttttgaaaaaagctaattgagagcccgactacattggcaaaggtgtagacttttcaattacagtacatgtacatacagacacgagagatacatttgcattgtcacgtttgctagagaagaccgtctccctttgagataattacaccggacaaggatttaattagagtcttcgtaaagcaggagaatgaaaatgtatgtacaggtcctgcaaacccccaaaatggagaaggctgcatgtcgatcggcctgaagtagcggcaaggcctgaaagtgaaaaaagcgatatttccgtattacttcgcccttatgaccaatcctcgtccaaatgagtatcgatgaattttcaggaaaattcattcaagagaaggggtcagtattaggcatattgccgtactgttggatggaggcggtattttaataacagcgttattattttactagggcttcgcgaaggctgggatagaaggattttggtatagccttccttttttttattaattattttgtttaggtacggtcatctcctgcgcctgcttcgcagccgcagtatctgtccggaaatttgcgttaaatctgtagatgcaagatatcaaccggcaatgctttacaaattaaaaaaaatcgaaccttggttgagatctgtttgtagcttgtagaaaatgtaaatgcttacctcgagtgctgttgtacagtcccctcaagcgttctctttacatgtactccacttcaaccaaccaaatatatgtactgattcatatcagtatcgtcggtagcacaccggttcgatttgcctagggggcctagtgcgacaccggggtcataccggtgtgatgaatatcataccgccccagtctgcccaacgcacataaaagttttggaggaccggagtcgtaccggtttcgagaaaatgtcaagcgtttgacttgatgtaccacggatataatccgatttggtctgcggtaggttgcttcctatccccgtaaaaaaatatgggtatttattttgaagtagctactttttgattgctgactagccacttctgaaattgattaacaaaatagccacttttttcgtacccgatagatacttggtgtcttccttaaatgacaacgatagcaccaacgcccgccgcaggcgggtcctgccgactaccgagcgaagcgatgtgctccctctccgggggaggtagaggggggtctaggccccaagggtaaagggttttttagggatcagggtgttgttataatgccaaggcgacttaatgttcaaactagaacgctttctgtgatttaagatccgtgtgcgtagtacgcggtcgtaaacccaggtaaactgaaaagtagctagtccaaaacttatttggggtagtcattttaattttgagctaaggcactttttgggtcaaaaatagccacatgtggctatttcaaaactatatagtaaatagttgaagaaccgcacccaaaaaatatttaaaaaaataataacgctgcgtaatgatgatgagagagagaaggcaccaggtatggcgtatatttaggcccttatttcggagcctgctggaagctggcactttgacgtctaaatgagttaccctaaactgttcctagttgatcagtttcccttgtaatgatgatgatcgaattacgagttgtgatgattagatgagtgcaaaatctgagaagaagactaagcgacctacactttgaatcatcgacaactttgattagtggatgaacttgaagtggacgtaggataccaccgtttcgtggcaagcacgaaccgcgattgccaccattgtcgtgtgtaccgcacgcaaggatctcggggtaaacaaaatcgatactcaaaggcttctcatttcttagagcgcctcggctcatttcgttatttaccagtcgtctgcaaccgacaatgcgctgtcgccccatgttcctgctcgacgcgggcgaggccaaagaactcgtaccgctcaagatgctgttcgtcacgcactactactgcaactcgctcattgcatatttatcggtgcgttgaacttccataaaagcaaaaatatgaaaatttgcttacagttcgcgttggttttattagattttcttcgaagggaagggcttctccaccagtaaaatcggcattctgcttgcgcttccgtgtctgtgcacgctgctcggacctccgatatggggagcgatagcggatacgctacgccgccacaagcaagttcacgtgttgtgccacatcacagctgcacttctcgtgttcgccatccagtttgtggattcgtttccgctcatgtgcgcgacgattttcgtggcgtatctccagatgatgcccaccaacgcgatgctggacctcgccgcgatgaagctcactggtcgatacggaggcgatttcggcaagcagaggctctatggagctttcggttatggcgtcggcgggtatatctccggtatgatggcatctgcagtcggaattgattggtgcttcacgatgatgctcgggatggcgtgcatctcgttgttcgtgctgatgtactacatcccctccggctatggggacgacaacgagccgacaagccacaaaggactactgcggagcagtgcgaaggtcatcgcccgacggcccgacgttctcgtgctatttgttgtggctctgggggctggcatcagcggtggattcatcgatagctaccttttcctgaacgtgtacgacctgtcggacgacggagagaccatcgtaagtgtcttcgttgcggtggagacgctgtccgagataccgatctttttcctgtccaactccatgattgagagacttgggacggcgctgtgcatcgttgtcgtcattgccgctttcttcgttcgcggggtagtttacgcttacatgacacagccttggtacgtcgtgccacttgaaatgctgcacggcgtgacgttcgggttgctggcagcgtcgttgaccacgtatctctacgcagcggcaccgaaaggggcagctggtacaatgattggtttgatatctgctttccagcggggcgttggggctggcattgcatcccttgttggtggccatatctacgacgagtacggggtgcgtacgatgtggaagctcagcacgtacgggatcgtcccagcattgcttgttcttgtcggcgtgtttgcgtggctggcccgtcgtcatgccagcgccgccgtggatttggaggaacacctcgttgagggaatcgcgtcccccgttcaagtaagcaaataatcgccggaccaatgacctcagatcgcagctccagcttccttctgcacgacaataatttttactttgtcttccgtagtctttgaatttcataaactttttcaaatgcacatcgtacctttcatttgtaactttcactcgaaatgacaacttgtaattggatttcttcgtgccggtggtcgatgcaacctgagggagacaaaacgtgaatgacttgcctttattcgttagcttgaccgaaaattttaaacatcaaaatcgtgtagtatccgattagttttcaattgaatagcgctgcttctaatcgcgctattcgctcgtctagcaggtatccacgttgtctagccatccactcaggtgagctgaaaggcagaaaataaaataaaagaagcgttagccttttgatcactctgaacgctgattagaggacgggcataccctgagtggtggtcgctgaggcagtccatgaaaggttgactggcacgtaaggaggatccgaacaggatattctgtatgagcacacatgtcaacagtgagctcaatgcaactcaaagtcgatcatcttgagaacgtacctcggtcgtatgactgagcacggtgcacagtgagggtccagactcggcctcaatgtcgtcgcttgggatgcccaaaggctggactctgggtatacaaagcaaccttccgtaagcgacctcacattaagcacatgatcaaccgtagggatacgtacgcgtatacagctattgaaggttgtgcttggcgctcgaattgcagtctgcccaagggaattgaaccgagttagctctatacaccaatcaaagcaaagttcacagcgacaacctaccgcacaaaattgcaggggaagaacggcagcgtcacgcccacctcccggttgtgcggtaaattctccactcttttcactgcaggaccgtcacaaatgagaatttccaccaacagcaccaccaacacagtaccgtacgacgcaccatggacataggacctcggtcggttctccaccgccacactcacactcactgcgcacgcgttctacagcacaaaccatcgccaacatcagtcccctattgcatctattgaacttgttcagccccctcctccccaccttgttcagaatccggacttccgacagcagcgccttgcactcactgcgattagccccaacgagcccccaaccgttaaataacgatcatcacccgtattcaaccaccagcaactctacgcacagcgccagcacgagcgtctccttggggcgcacgtagctctgccagcacgaacgggtcgagtagaccagcaggtggttggtcgcgcccgtgcccgcagcccccgaggccgaccgcacctggaacccaatggccttcaccccctcgtccctcaactccttccccttctcctccttcttgtgccttggacgcatagagccatgcctcgtacgcatagagccatgcctcgtacgcttccggtcggtcattgactgtgctctggtgcctgttttttcgcgcctcaactttcagccgtttcaaaattgaacttccacgttcagttagaaacggacgctacgtacaagttgtgtaagaaacgttgctagggtaagcaccgtagctaacctaaacgtttctaaagcccaaagtgaagtggcgcatcagcattaggctacagtatcgccgttcgccatgtcgttcgcggccttccccgacgcccccaccctctccgccttcgatgacgcgccgctggacgcgcagctgtacaccatgatcgagctggagggcagccgctaccgcgccttcttcgccaagctcacgcagggcagcggcgcgcccatcgcgcgcgacgcggcgctcgagttcttccgcaagtcgagtctctcggaggagcaggtgcaggagctctacgcgcggctcaaggcgctgcgcctgctgcccggcagcgagcgcgtgggcgagaccgagttcgtcatgggcatgcacctcatcgtgtgcatgaccaagcgcgggctcgcgcgcatccccgcggccttccccacgtcgctcttccccacgctcgacctcacgccgcagacgcagacgcaggagcgcgcgcccattgtggacgcgcccccagcagcttcatcagcttcggcttcagcgctggatgacgcgccgctgtcgttcattgccacgtcgcccgccacgtccgcggcggacgcttcgtcgctcacggagctcgtgacgacgcagatccgcacgcagcagcacgagacggaggtgctgtcgcgcgtggaccaggcggcggccagggcggtgcagagcctgcaggcctgtgtggagcgcatcgcagaccaggtggacggcctgggcttccccgtgccgagctcggccaggtcgctggacgcactcaagaacctgctgcagaagcacgtgcacgccgccaagcaggagatccagagcatgcagatcgacgcgcagatgcggagcgtggcctccgaggagcaggggccgcgggaagacccgctgaaggtggcgggcgagctcacgcaggagctcatcgcgctgcagcaccacacggcacagctcatggccaagaaggcgaacgtgatgggacgacttgtagcggtcaagtctggagggtcagcggcggggggtattatccagcagacggcgggtgcgggctttatggagtcgaacaacccggcgttcgcgctgtccaagggcgcactcacggtgggggagctcggcacggcctcggcgtcgacgacgcctccgaaaggcgcgagtccagcgttgatgcagtcacacaacagtgcgtcgagtgggggctggggcacgttcggcgctgctgcgtctcacgaccctgcccctccccaacccttcggggtgaaggctgatagcgctccggcgtcgaattcgaatgacccctttggctttggatcgtcgcctgcagctccagctgtggggacaacggagacatcagcggccaaagcatcggacaagggagcagacgactttgcgtgggggtcgtttcaataggtaaatctaaccatttttcttcttcttgatagcgtgcattcgttttgctacagctactatggcggactgtttaggctagccttccgacgtaagagcgcagtgtcatcaccacagagaaactgtcgatcctttcagacggatcgaagcagtacattcggcgcgcgaggttccattcatcatctgcgaattgaggtgggcggtgagggagtttccctcgtaacacctcttgtcgaacaccagcatcaagcccaatattgatccaaggtaactggccactcagtagctccacgatgaacattccaaacgagaaaatgtcggacttgaaggacggtccactgtcaacttttcctagtctctccggtgctttccagcgcactgcaccgacgggctcggcagcttgggggttcaggttctgagcgaacacgctgagaccgaaatcggtcagtttggccttccgatcggcgcccactagaatgttattccccatgaggtctccatgaattactccacgctggtgtagatgctggagtcccttcgctgcgttgtacagcgcagcccacactgggttgcgcgggcgaccgaatagcgaatagcccggaatccaatcctgccacttttgatcacgagcgaactggggaagagttccgttctccgcgtactcgcacaaaaagaatggggttccaacatggcacgctccgaagagcttgaccacgttagggtggtttagcgaaaaccacacgtcgatctcgtggaaaaagtccgccttgtcagcttggaacaatagtttcactgctacatctgcctcgaaccacttgccacaatgcactgatccgaacgacccggagctgatgtatccacgtacatcgatctcatgccaaggaacatgccaacgtggaagaactggaatcgccgcatcaccgctaagaccctggattgcacgtgtcattgcgtcaagagtatcagcgctatagatgactctgcgtcgatcgatttcaaaggcaagcagtgtagcgacttcaatccgttcctcttcgtctcggagaccagcaaaatattccggatcctggagcatggtgtcgaaatcgttcagctccgttaggtggtcccaatcccagcgatgcttccagctgtgaatgtggctagccgcttcgggcaaatcgaaacgcaccaacaagtgatcaatgctgtgatggaacgccaagcttcgatggccaatcccacgtgatacaatggttctcgaagcgaggtttgtggagtccacacgatctgcaagtgaccacttacacgacgaagccagagcgataacaacctgtaataggtcttgccgacactgcgagagagactggagatacgcgtgtatactcgccaaacgctcatatacgtgacgatccattggactggcggggcactcgatgtcatccaaccgttcctcaatctctttcatcaactccttgatcgtgcgctgaaagtctggatgttcgtattcatcaaccgtcgctacgaagaccagctctgagctgccatcaccacttgatcccccaaacactcccagctcggtcagctcggtaagacgtttgagcacggcttcaggtttgctcgtaggggatttactgaagaaatcactgtcacaatcagaaaaatcgccatcagagtcgctttcgctagcttgatctggaccactatcagcacgtttgttgagggttgaagcttgcaagtcacgtcggccattgtcggtgccaggtgatgaatcaaattggttctctggaagaatacttgcgccattgacaacgctctgcagttgctggacgacatatttcatgtcaactcgctcggcggggtccgcaacgcacatcttggatagaagatgccacacgaagtcgtcttcaacgtagcttggacgctctgggagggttttgatcatctgtggcgtacaccaagaccaggccgagacgtcttctgcagtcgcgatgtcgtggagaatagtaaggatagacaaaccacaactggatgaacgcgaccaagcagtaccagatctccacccaacaagtttgccgtattgctggtcgtactcaccaataacttgtctggagcaactccaccgcacacaatccccctctcgtgtaggtactgtaggcccagcgcgatacccagcaaaagttcccagatcgacttgtggggggtgttcgtcgcccggaggtttgcagatactccaggcgcgggaagtctgcgcagaacgttttgtgtgatttcatctgcctcctcaaccacgaagaacgctggatacccaacatgacaagcgcctagtagtcgcgtaacgtgcgggtggttgagctccgaccaaatcgcggtctggtaaacgcacgcttcccctccagaggctgcagccgtcttgacgttaacgttttgccacaataagtcgccatttcgctccgtaatctcatgacgcgggatgaaccacttgggcaccgagaccacacaggtgccactgcagcggcaaacttcctcgtagactgcggcgataacctcgcgttcggctgcagtgtagacgtcctctgaatattttccaaagtcgtacgccaacaacgtgagcagttcgaatgcatttccccgatgtttttccaacagctcaactgcttgaccaggctcctccaggctcgaggcatacacctgcatcctccagtctcgctcggccttgagatcccgccgccaatctttcagaaactctgactcggggattccatacgtttcagccgcctcgtccatcagaacgtgaagatcggccatccgcttcattacgaaacctgtgcgagccaagcgaagaagagggttgcgctcactctcgtaagattcgcgaggaggaggttcagactagtctattcaacttatgttatgagattgtctggaatgtcctaagccaggtgatcagcgccggtacctgagatgatcccggtggctgtacgtggctcgcctctggtcgaggtcctctcttggtgtccgctggaagagatccaaacagataagtaatcttgtgccttgaactattgtccttggatttctgcgttccctacgtgctagtgctcgtagttgccggagtccagcctgttggaatgctgcgacgctgcttgcaatggtaaccttgcccccattgtgaaccacttggtttcgttgggtccataggactgtcatgcatactgtgctcataacccaccatatccgtttccattcacgcgcgtggtcgtcggtctgatcgggaaacgcgctgctaaatcgacgacgcaggtctgttgtaaacggtggtgatactcgagacgcgcaatcgccgtataccgaagaagctgctggtcatcacaccttcgtctaccccagcagctgataagatatttccagcatgcttgggcgcacggacactcccaaagtaggtgcgtgagtgtctcctttcggtgctgacagctttgaagcttgcgacagcttgcatccatttgacggccgtcgaagaagagattgagttgcttcgttgccgctctgtaacttacccatacttgatattccgtaatcgaattcttgtgagcccacagttgcttcggtgtttgttgcatagctccgcgctgccatggatccgctgctgcagttgtttccaagcgtgcgaccacagaccgtagctcgcttcctaattcttgcttgaacgctttgaatggtagtttcttgattgcagacaagacattgcagtttgacacagtttccggaacctcccaagggaagcggtggagcaaggggtgagctttaaacaccagccctctactctcgtaagattcgcatagctcggtgatctgccagtctatcattgtgcagatgggcgaaatgtctgggtccctctcgtagctcgagttgtcccacatattccgacatcgattccacaggtgacggctccatcgcggcgcgaaggtcgtcgaaatcgggaagtgatccgaagagggaggagagggagggatccgagatatggtccgaattgggtggacatagtgtgtccaagtcttggaactcaattgatactcttccgtctggagcacacattgtctccactatatagactcagcttgggcgctcactccccctgcagacaccagtgcccatctgtgggatctctcttctcctttgaggctttttggtccagcttcaacttgccagttttgtggaccatacaataaccaagtaaactaagattggtcatgcccaaatggtgattgacgttttcacgactggagactttctcacttacttactgtaaaaactgtaattatgctccttggggtactgcagcagtacccccctgccaacatggggcattgttacaagcgttaaaaactctatttacagaatgaatttgacagtaatcactgacattggtaagtcgacatacaaaccttacgattatgatatgaaacatttggaatttatgaggaaaaactcagaatcaaattcattttttcagataaaaggttggggtggggctctatttgagggtggggcactatcgcaagtcctgagccaaagacgtcaaatttcatggtgtggggcactattagagggagggggcataattgcagtttttacagcaggtactttccagttggtaatttaccatgtcgcggcgtggcactaaccgggacgaaactcggacggtggacgagatcgtgcgtgcgttgcttacccagaagctgtcaactccactcgataccgacagtaagtcgctggatgtgagcaacttcctagcgatacggatcttgagctcgtatggactcgcggggctgcgcgtcttgctccagacccgcatcgaagccgtttacgcccccaatcaacttgtcgccagcgaggtggcccaacactccgcagctcaagtgcacagcgcgcttaagagctctctgtggcacaatgaaaaggtacatctacgccagagtttgctcatttcgttcgccgagatggactatctgggcgacgcagacgaaaggttcatccgctacttgcagcggtgctgggcggtgtaccagcaaggcaatgaagtgcagttggcgccgtgcactaccgtcgtgcagagctcgggcttcggcaagagtcggctgttgtaccagctagctcgacagaccatcgaccgggaggagttgggcatgcgagtgctctacatttgcactcgcttgcacaagtcgtcggggttccccgaggcgactgtgaatctccgttcgatgctgtttgagagcggtcagacgcagcagaagctcagtcgccagctcgaagctatctaccactacgcgcagcagaactggtcgacggttgggtacgagtggatcgagctctttacgaaccccttcgcggaccgacccacagagcaaaagctcacaggagtgaaggcggtgaagtatggtacaactggacgggcggtgattctagtgctggacgaagctagcgctctgctgacagtagagaacggtgggatcgatctgctccaaggagctctgattgctgccaacaacagcatttgagctttgtttccaggcggaggaatgttcgcttttcttgtcgatacgaatccggagatcacgggtttgcgacttccaccaccgccacacgatacgcccaaagcgagcgacttcaccatgttccctccgttcgtgctgaccgacacgatggacgtgttctggcgcgattactccagcaagttggggatggatgagatttccgcgtacaagttcgtggtgacccagggcaacaagaacgaaactgtgagagctttggtgtcaatgggccggcctctctgggcgagcttcttccacgcttcaatccaggaggaccgtactactggcatcggtaggtgggaattggtcggtgcgagtggcgtctttgacgagatggttcggctggcgtcgagtaagttgttggtgggtctggcaccgttgatcccggccagttataacgaggacaccatgttcggcatcgcgtcattgctgtgtcgactgggactgcgtccgcgcttcacaccatctctcgcatcccgcgctgtcgaaaggttcatggcggttctagcgtacgtgagtcgcgattatgatgggctggtgagtgcgtacacgtccgacccggtgctggcgctgggagcagccgacttgtggcatgtatgggggcctttcgatgggaagtcatcgttatcggagtgtgtcctaccgcagctgaagaatctgttggtgcaagaagtgttggatgtggataaaactgatgagctggtggcccgcgtcgtgctgcttctggcggtagatttgtgtgtggtggtggaggcggaggcaaaatatcatagccagtgtcactttgggggtcaacacgtgagagttgggacgtttatgatggtgctgggcggctcggatccgcctgtactaaccacagaactgacggcgcgaactgatgaagacatcaaagttgcgtttgagacgtggaagtcgaggtgggctggctggaaaatggggttcagccactttattcagttgacgctcgagccgacggagcagacactgtggtttttgctgggccgccacgcggctggtgtgctttcgcgagatgtggaagaggcctgcctgatactaccgatgtttcgtggggaatcagaggtgtcatttatactggttcaagtgacggattgtgtggaaggtggcagcaaacgcacgggtttggaggatacgaatcgagtccaattcctatcggacgacaacccacttcgagcgagtattttgcacgacgtgatctacgtgcgcatggcctcaggagagaccgtgccacagtctgaagcggatcggtactttgtggctgaaggaggtgcaacttggaatatgaacacgccagtgttctcgcttcatgtacgctcggtaagtacctggaagttctcgatcggaacgcacacttatcaggtcatgaaggagtcggaggcgaccgaattggtgaatttggcgtcgttcgtccggactcccatggcacttatacgcagtgctgtgggttcggatggagaaggcgtggtgacgtcaaaagccgaaatcggtatttccggcgaagacggaaattaagttttcctggaagaagaagaggaccacgtttgtcaagacttcagctccccaagtctccgttcaacccgaccaacaagctgcgaagtcgcaggcgggtcagctggcaaccgggcccgaccctcggttctgacccggctgttgtaggaaagataaagcagtcgttcttggagcgacggccaggaaggaactccaagcaccgacacgatgccgcgtgcgccatcagtttttagacccaccacaccactccctaggctacctcagctcggctcactcatgagcccccccccccccccccgaggctttccttcgataaccaagaacgtactgctttgccccaaactggtcctcgcatgtaaaggaaggaaacgatctcagtagctgctagtgcactgattgacgagctagaagatggtgatttcgtcgttgataatggacaggttgttgcctcaaaggagagtatgggcgacaagggataatgttaaccagatatgacgcgttttgaagtttttcttttgcacagagtttcctaaaggattcttctcaaagtattataaattgattaacacgcgcagttcacgagctggagtcacgagaaccgtgcgctttatcgcttaagattgtgaatgaggtcgactgtgttgaatgcaggagaccgttctaggttgaagagcaccaatgtacacgaaaagatgaaactcgattcgcctggctaaatgtgtcgttcgtccccaggatgttcgttgccaaggacactattttagctcgggcagacactcctccgtccattcggttggacctgcccgatggggtctacacgtaggtgccacgtccttttcaacttgtggaggtcgttgcaagtgaagcagcatggtagctactcagccgggagggtgcaagacttggccagtacgagcggttggcgagcactacgcgtgcagttgccgtggtgctggcgaccccgttgccatgcctagctgtcactctcttcatcgacttgttgcctctttcgcccccgtcggagggtatcatcgccaacagactcttcctattgcgagagttctacgcgtacctggtcatgacgttgctcgccctccaccaatttcgtaagggaatcccggtgctaccataccctaccaggaagcttttcagggacacactcctagtgccggggctgagtattggtcttttgtacgcgttcatatcggtcgttggctttcctctcccgttcacgacgctgacgttggtgccaccgtgggctgtgttgatcgtcgtttgtttggcggttcaatgggcgaggattatccgagaaactgttggcgccatgccgatgtcgatcggaatggtgaagctttgggtgtgcgatttcctgcttgggttcatctacccgccgtacttctacgtcttctcgtcactagcgaccaaagggaaaatcgtattcgtactgctcctcccagtcattaaagcgctgatgaggaagctcttctctcgagcagtccagcatctcggcgacgagacgcctgggctggttgtcttcaacgccgacgtgttcggatcgctcttcatgtcgtactgtatgcagaggtcgccctcgacctggacaatgacgggcataatgaccctagatgtgataaccatggcgatatcactgcgggatgtccatatcgcgcaaaaagagttgaaagaaatggagcgccagctagacaaggcgcgcgtatggcggagtcatggtggagcggtgggtcacatcagtttaggaagacgcgtgccaactacgctggagcgcgcgagtattctattggaccagacagcagcagagtacggccctagtatcgatatcgtggatgtggccaacaaaaaccgcatgatcgatattcatcccgccgatcacggagctgttgctgttgggcgaagatcaccaaccgcggtcgttgaagccagctacactttaaaggtgcggagactattgtacatggcagaatttcagctgcttctcaactacgtcgaagccatgatcccgctcgtcttctgtaagtacttaagtactgctagttttttcttcagctcgtactgtactatgtcgcgtgtgagcaataacatgggtttgtgatcactttagctatttacctcgtagctacgtactacctgcccaaccgcgactactaccgcacgctatctataatggcatggaccatcaccagctcttccagacgctgcagaatgtgttgctctactgcattcttcagatggcctcgcttttcctcttggtcttcatgctccgctgcatgctgggactatctccgattaaacatatcgcctttgttctggaaaagcaagtcgacttcgtgcaaatttccatcgtattctgacaacgtgcagagctcgctgcagcacatgggtcagcaactattgcttcgtctgaggaacctggcaagcctaatgctagtttcgtgctgtatattgcaggttatgactacagctttaggttagcgtggctctctgtaaaactttctgtgaggtaaaccgaccacaattcagattttgagaaagttttcgacggaacacattcacggtttggcagtaacgggacaatggcattcgaagagtgggcattcctggacgaatggtgcgggacgatgagcactctgtttacagccacggggagctccgcgatagtgtggcggtgggggccggactacaacccagctctccagttcaccatcgttcccccgagagacaggaagttaccctcgattgaacgcaccaagcaactccaaacacttcgtgagggactcgctctattcgctgcagtggcttggatcgatgttaaagcactcatctatctgctgaaaacgaagggggtttgccaagtccaagacgagacacgaagtcacgcgtttataatggcagagctgcctgtgttcgttgagatcgaagtggctcggaagctgagcaatgacccaagcaaaagtttcgcgtgggtcaaggacgatctcgtatctctctgctgtgaactggacgagcaaaacactagcgaagcgttccatgaggcatgggcgaaggtcgaagtgttctccagaaccgactcgaagcggctgaggggctggcaatacctgttcgggtgattattggcaaaccagagtactcgaaagggtcggacactgcatctgggcgcgtgtgggatgtcgtaaggaagacattgaatcctgcccgagtccagtgggggtggttttcgtcgctggtgggcagttcttccaccctggcgagaagattccggtctacctattacgcctcatttgttgtcacttgcattaacgcaaagaacgcagtgactttcaatggcgccagtgctgccttcatgaagttggtgactgaaatgggtcctgaggctcatctttcagcgatgaatttctgtcttgtgccacactgggactcccaacgtgtttgccgcatgatatcaggtctatttggtggtaacacttgccccagtgatgtcactattgaaccccgagcggtggactatgcgtgcgtggactttcaagccgagagtggactggaaatgaacgcgctttgttcagccttggcggtcacgcgttcgtgtcggtcgttcaccttcaacctctgttcgtatgactcgccctcgatggtgaaagtgtggcctacgcgtttttctcgaaccgagcgccatcacgatcttctgtgcagcacgtaacaatctataacgcccatctgaattttagagtactggaaacggtgtcgaggatcctgacttctcccaatacggagctggtactattcgcagtcgctatggggctggaaaccacaatgagcactgggcatgacgcgcgcgagtatcatttgcgtgagaatgcagtcatccaagttactgaataagctaccggccgtgtgagctcatggaaattgacagatatttttcagcaaagtgaagctggaggagtggtgctggtcaatctttcggatgatggctccagtgagtgggtggacgtgctggttcctggcattggcttctgtaaagtccaacgctccgacctcggtgtgtgcgaccacgggaaaaactcggacctccaaccgaatctggagctggagattcatttccggcactccttgggccgtggacacctgacgaggttcctgaggcttgttgggaagcatctgcgcagcgttcgcttcttcataggtgagagtgctccatcgccatgaaacacactcatgaagaccaacttgcatgcggccgacagttctccatctccttcgacctccagacgatcgaagcgcctcaatccgtcttcaaagctacccacgtgcgacggatcgaccaccacggtcaggtactgcagaactttattcccattcaggatacgagtcaagccctgcaacgctccagcataagtcccatatgataacattggctccgagttgcagtgccaccagcgaaggttccttgtgagcgtacttgacccattactcagcgtagctgcgagcactcggacgtcgtcgaaatgacactcgagacgacgaagctgcgggttgtgctgctgacacgctgcagcaaaagcttgagcggagataacgtcatcgcgcagcgtcaattcctgtactccaaaacgcctgatcagcagctacgaagcaatgacgttcacctttcgcaccgcttgcttcgcaaactcaaatatgttcttcgccacggggacgtctggagcatgcagacgaagacgttcggtctggtctgttctttggatcaattttccgctgtggaatcgcgacgttaaaactgcagaaatcttcgagacgtgtcgacatttgagttttttagtgcccgataaaaattgaatgcacattttttcagacgacgacagtatgaaaaaatataatatttcgtcgcttcttgtcaatcaggtgcgctggagttttttctttctcggcacttttcatttggaagtgctaggggtcatggcgcttcaagccgtggaattcatgcagccttggtgtcgacgcatggagaaatttctcgaggacacgaggagcgaggtgaaagtctggcgctggggtccagacaacaaagcggccattcagttcactgttgtgtctccgagtttcctactcatgacggtggaggagcgtagagctgatcttaggattcttcgcgaggggatttcactgtttacagccctggcgtggatcgattccgaagcatccgccggtctactcaccacgcttgcatgcaagcctgaagaagcgtattgggcccacgagtccggaatacccgtcctaccagtgtgtgtggagttgaacctgtcaaagtggcgagatgtgcctgaagatgtggcctgggtgaacgagatgattacctccatgtgctgcagactggatccgcaaaatacaagcagcgaattcagagaaacgtgggcagagatcgagcgcttactcggtgcatcaagtaatatatctacgcgatccttaatggctctcaagactccggtgcggctcgttgttgacgaatttgacgacgatggaccggggggagctgtgttggctcagacgtgggaggtgatacgggaggtcatggacaagaatcaaatctcctgggggtgggcgtcgtcgatcctagagaagcctctttgctgctcaataggctcgcgacgagactgtttcacctctttcactgtggactcgatctccgcacagcatctcagcccggagaacgccttctaccttggcaagataatgacccagtttgtcgacctcgtgggtgagatggccggccgcgttcacttttcggacgtcacgttcccgctgttgcttgtcgagaaagaagcgactgcagtcggacgtttcggtcgaatggtttccaggatcctttgctcctattcttgctcccatcgagtcctggaaggctaatacgcgacgaatgttctggccgtacgctgcaccaccaccaggcaattcagcgcattttgtgcggctcttgcggtgagtcagtcgtgccagtcgattcacattttcccgttcgacagcaaggtcaactccacgagagcgatggcgtggcaatggttagcctacgcttgtttctcgaagcgggcgcgtgcatactaagtactccccagtgaggagaatcaagcttacggaagccgatctgacccttgaagacgcagacgcaatggcaaaaattatcacgagtgagaacccggagcacgaattattgagatgtgacgcgcatattggagatgtattttcaaatgatgggattatcatgtggatggaaacacggtcgtccgggtttacgatgaggaatcgttactgtttgaatcgtccgaggtttcgcaacgtggacttacttgtggtgtaagactcgtaggggacgacggcgcaagtgagtcggtggacgctcttgttcctggctttggattgtgtaagctccagcgtaggagtctacaacggtgccattcaagaaatctccacaacagaccgaatccgttgcgattagatctggaaacgtatcgttcatgcgatggcgttcctcgactcctggagcttgttgggcccaccctgcagtgtctacggctaacatcactttatcgtttaactgaggtttttgacgtgtcttcgattctttcatcgtgccccaacctggaggagctaacactacagcagcgaaccgtatctgccgaagcatttgtgcggagctgtgaggagaacaagtctcgactgcgtcgtcttcaagtgatgttcgacgattacagggtcgtggccaatgcgctgaaggacgactcgctccagctgaccaagcatcttcggtggtggtattgctatcgttttcgtctggaattggaaccagtggtgccgttggaagaaatgctcgacgtaaatcggtcgctgaggtggttaacagtcgatacacccaaaagcacggagaacccgtcagcaaaaatattgatggggtacaacggacagcaactcgacgtggaggctgacaagttgtcgacaacctgcaagctggcattcctgagcgtgttcagatcgagggaggagcctcgtccgtttaaaaaacggtcagatgaaacgctcagagcccccgatgacttttgtttgtcaaggattttccagtttgctaccggccgtgcagtacgaagtgtgaaaatcgtccacccgtaagacaacaagtttagcgctacgagtaggaattgcacgtaatagcatgcgctcgtctttcttgggctcgtgatcgctatcagatccaattacgacctgtaactatctaattacgcagtgccccacacctacatattatgtagcaaaccgagccccctgatacattttgtttcttaaatttctcctgaaacatgcatgataattagttaggtccaaacatttgcaagcacaacacttatttttggccggtaatgaagctgtttgttcggaacaaattgttcccaaccaaaaaatcataaaatagaggaatacatgcctttagtgacggaaacgaattattccaagttttttaaattatattctttactaggtaaatgttaatatatacaattagtatcagaatagtactattatttaaattgcatattctaattaagaccaccaaaatatgagtaataatagtagtcaatatgatcgatattttttacatctgtagtagttaatacaaagaaaaaccttcttccaataatctaaaggctgaattatatctcattttttactgttcagtcagtgagctgtgtaacccaataacgactacggaacggtggcgttagttacgttctcatgaccccggaagtacggcggtattgacacggctcgctgtcatcattccatagacgtccactgtggttagaacacattagcggtatagtcacctaataatggcacgacgtgtagagtaaaagtcagctggatcgggcgtattgcatacaggctgtatgcaatacgcccgatcctagcattgtatattgtatcaatgaagcatagaaccaaaacttagtattcatcaaatagtcttcgtataatactataaagtagtttccacaaaaatgttactgttatttgtgactatattaatatgatgcattttaatacgagtgattatgatgctttccttaaaaagaagcatttgcaccaatatgatttgatagtagtgctggatagtagtactattgatagatacaattatttaaatttaaaaaataatacgagcccgaccagatcggcggagatcgggagagtcttcgagaccagatcggcggagatcgggagagtcttcgagaccccgtcgtttttcatgcgacggtggcagcaagcggcccgtctcgccgagggaagtggcgtgcgtgtcatgccatgacaagagtgaacctccggaacctctcgactgtctgtcgattcctgtcgcagccccctccggcggagggcctccgcctcaaaaacgcgcttccctcccccacggtcatctgcatggagaagaggtggctggccgtcttgcggtggtagaaccacaggtctccgtccgtgatgaccatgccgttgccgaacaggtcgaagctgatgtactggccgctggggccgcgcaggaacacgtcgtcctgcgtcaccagcacgtcctcgaacatttcaggggacgagagcacgatggtggcggggcgaccggggatggagaacatccacgggcggttgccgaactcgatggactgctcgttgagccagtcgtggaagcgctcggcgttgcccccgtcgtccaggatgttcttgagaatggggagcgtggtcttgggcatgggcgggagcttgcgagcgtcgctcttcttgctcttcttggtgctgtgcaggaggagggagagccccagactcacggccactgcgaagcgagggacgtgatggaggccacagtgcatgacaaactgggggtgttcctggatgtgctggacatctaccacaagcgcggcaagcccttcagcatcaagcaggagctgagccacttcaccatggacgccatcgccaagatcggcttcggcctcgacatggacacgttgaagaacagtccggaccgtgaagaggaccacgagttcctggaggccttcaacaagggatcggtgccgtttggtgtgcgcatccagtcgccgctgtggctctgggagctcaagaagtacttgaacgttggctgggagaaggtgctcatggacaacaccaagatcatgcatcagttcatcaacaaggtcatcctcgactcgatgaacaagaaggcggagctggctgcgaagggggagaagatggaggccagagacctcgtcacgctcctcatggagagcaagctccgacagacggaggacatgcacatcgaggacgatgacgctacgatcatgcgcgatatggtgatgacatttgtcttcgctggcaaggactcgacggcgcacagtatgggctggtttatcgtcaacatgaaccgctacccggatgtgctgaagaagatccgtgaagagatgaaggagaagctgccgggccttctcacgggcgagatcagggtgccgatgcaggagcagatcaaggatctggtgtacctggaagccgtcgtgaaggagaacattcgtcttcacccgtctacgggcttcattgtgcgagagaccatgcaggatacaacgttggtggacggcacgtttgttgagaagggtcagacgctcatggtctcgtcctactgcaacgcgcgcaacaagaagacgtggggcgacgactgcctcgagttcaagcctgagcgcatgatcgaccctgagacgggcaagctgcgtgtgctgtcgccttacgtttttagtggctttggatcgggccagcacgtgtgcattggccagaagttcgcacagatggagatcaagatggcaatggctactctcttcagtaagtttgatatcaagacggtggaggacccgtggaagctcacgtacgagttttcgctgacgatcccggtcaagggccctctggacgtggaagtcacgcccctgacccctttgacaccacctaagtgagatgacagttatgaataccgaaaacgaactctgttagttccctaggtcttagccaatcgagatatcttctctatacgtttctatcaaaaaaacttccagactgcatgaattcactgcactgtaccaactggatcgttgacgagcttctttttgagcgtcgtgcttcatcctcttggtcttcgtgaccgacgtccccaggctgccatcgcttgactggcgcaatgaaacgaacttgaacttgagataatagtaatgatgttacgcaggtattcaatcgatataatatatcgatcgattgataatattattatcgtaacgagtttttcaccaattaaaaataagttgacatgtgaaacctgaaacgaagagacatacaactaagaaagtttttcaaccattatgctcgttagcttattcaactttaagtccttgcaatacctatggcttcgacacgtacgggcaatggctggagtaatcaggacacaaaacatcaagttaatagtcgaagaaatgatgaagtagtttgacgtcgtggagtttcgtgttaccagcattatgtcgccgttcaaagcatgtacgaagtagtaccacgtagcaggaaggtaaacatcaacatgtacatagacttacaatagacgagcaacacgtaatctaaggtaaaaaatatatagtgagatgtaacagcacaggacgtcgctattagatttcgttaacgattctagtgttggttccaccaagcgcctgatacatcaactcaggtctgtcattgcttgcccccccccccccgattccttctcaacgtcgctcgagcccgtcgctgaggcatcttgaagcataggcaagtagacgtcgaagacgctcgtcccagaggtcagcaacttcgtcacattgccggtggatccgccgttcaggatgtcgttgatgaaatccagatcatacgtgacgcgggcgcaatttgcaggcaaaacaccacacccgcacaacaccaacgaccaccccattaacagcaagtgggcctccggtattgcctgggcacaagcctttgccatccccactaccggcacaaatgacagagtctccagatgggagcgactaaattaggtcaaatcgcaaacttggtcaaggccaaatcttgaagatagatcacggataggtcacacatttggcacttaggtcacgtgaagctgctagaacaagctttagcgccccagcatcacccaagtcgttcccttcattactacggtaaagtacaacatgccgagtagctatttctggccgttgtacctgtcctaaactctggggtttttgaaaccaacatgatccaatagaaagcatgcgaccagtgggccattgggacttctcccttcacaaacacagccttcaagtcacgcgccaaccactaacgtaacccaagatggctcggcgccgaggagcctctacgtcttccccagatccagccccatctcgttctctgggcaatctcaatttgctccgacttcgcgtccgactcgtcgaagcagtcgcgcgacgagtgacgttcttgaaagagaactgtccgacgccatcttggcttcccaagagttacgggcaggaacacaggcgccgacgtcgcgttcaacacgccgaaacaaccacgcatcgagtgacgtccctgatagcgaggtgtccgcagccgtcgtgactcggcatggacttctgatggggattcgcgatactgaaccagacacgcctgcgctggcatgcggcaactacatctatgacgagaaaatcctacgtccgactgctgcaatgtgtacaagatgctgtggggagcaaactggttccaaaagatgtggtgtgtgactttgagagttcactgattggagcacttcgcgagttctttcctgacgtcaccatattatcgggtgcctgtttcattttaaacaggcatgccgtcgcaagatgaaaagcattgggctaccagttggtgaaatcaaggttgctatgtcgcgtaatgtctttgacatacttaccgtcattgatcccaccaaaattgctgtgcagggaatcgcttgggtgaaggccaagattcgcagcgtgtgtgaggtgaaagatctggagtactctcgcagcaagtggcgaacgttttggagctactttcagaggacttggttggagacatacccgccggaatactggagtgtgttcggcatgaggcgtgacatcatcagccggacgaacaacccattagagcgatttcaccgtgaactaaacaagtggtttaatgctcatccgcccatgaaaactttcgtgacttcgctagaaaaccttgctcgcgagtacgttgcgcaacggacgactgtcatctcaggcttagccaagccacctgagcgtaaaggattcgtcctaccaagacagccaaagctgccagaggtgagcgacatcgtcgactcgctagccagcagcgacggtgagggtgaaatagtcgatgctgacgcggactcggaaccatacagcagcgctatgtcctcggcgggtgacgaaaacgtggaacccggtgaggacagcgagtacattcagccggatcactccttcgagtacgacggcgagacgtagagagcctccgacacctacatcacggacgtgaccgcgcagtatgaagagggcagtgagcataacacataatacatctcattcattacgtacgtgaccaactgtaatcaggtcacgtgacctaacgacgtgaccaactatgccatttgacctaatttatcggttaccctccagattccaaaatttcggagaagtgtcaggggtcgcctccaaggatctccgggtccttggccttcctgggaggaatcctccctcgggagcccaggcggagcaagacgacagtaatggcatcttcaaggtggtcaggttcgacgacctcgtggcacaacaggctgatcaagacggtaggcgaaacagaaacgaaaaacagggtgtattggtgacgacgaagcgcgagatagcggaaagagtgcagaccgctggccacgctgccttgagaggcaatcgtggcgtcgggatcgaattccgacgagcgcggcgcagaggtgactgctggattgatgaagagcgggacggaagagaaggacaagaggggacacgggtgaacaatgtgttggagggacgcgtcgaggtggtggactccggaccgacgaagcgcgaaaaggaggtgttgcatatctcgtttagcaattgcatatcgtaggggtatatctcggtcgaatgccctagtggcatttggttggtgtgtacccgtgtgtttgggctactaccacgggcacgcgccctggaggcccgtgatccgtaggccaagctgcagcagtgcgcggcatcgggtgagctagccgtctaaaccgcaacaaattcaaaatgacagagtcgtccaccatgtctccgtatccgtcagcggtgtataatttgcgacactgcttattcgtaatgatctcgacgtccaccgcttgaagagtgtcttttttagggtcgttgtagataatcccgccccacccgagaatggttgccatcgtaccgggtctgttgttggacccgtccgccttaggcaaacgcgcgggtgtatacttcgatgagttttcgagcttgagcacaaccagctaccgacgtatccagcggattgtactctgggagactgaaagcctccacgacacgaatttgctcggaccttcccgagccccggccagacccatgctttgatccgatggaggcatacacatcgtacaggtaccagtccatacactgagctgacgccagtacgtagcgtggagcaatcagtgtgccagcgcaaaaagtttcactgtcggaaacgttcgcgcgcagactcacaatgtacgggtattccttgaggtccacgttcttgccgccgtagattcgggattcgtcgtccgccgtcatgccggtgtcggaactgcggacggtagcgggggccgacactgacgccctcgtcgtatccgggaaggagtaggcgttcatagctgccaccagtaacatggcatacgcgcccacttgattgagcttcgtcattgttggagggggagggggtcttgagtgagaagctgatagactgcttcggcttgggttggtgaatggccgccgtgcggtaaattccacaatgaacatgaaacctggattctcctccgagtaatcttaccaggacgaatcgtgctgttcgtaaactacgcgataaacccttgtactgtgcacatgtattgcctgtatcggcatacaatggcctatctcattttttatcttcacagtagtcatatgaagcatttggcgggaccccggggtccccgcttgccccataagcaaccggtatattcggtaaattcaagtgctagatgtatgtatctatgctatgtatctcttgaagtatcgactctcgagttgcacagagctgcagagttcgcaactttgcgtgctcgacgccgctgctgctgtggtaggcgctagcttctagcagtcagcttgaatctgtttggtcgtatcttcaccaaaacgcttaaccgaacgaacgaatgcagcagctttgcggtaacgacgatttcaatatcacgtttgcgccgaggaacctctgcacctccgttcacctagacttcatactggatgcaagatgcttgaaggtgaaatgagctctagctaaactcgaaaaattatcacaaaattgtcacaacctatatatacatgtattatcactgccccgccgataaaaataaataattccggtcgccatcggtacatgatgcgggaccccggggtccggccaatagcttcatatgggcaattatacataaccgtatcggtcgtaagcggcttcttgaggcccttgcagctttaggaggcctttggctttaccgcaacgtggctccagctgcaacaaccgaggctgaattgatagtcgcgttttcaactacaagggaaaatgcatgtcgaattgctttaaatctagcgccagaccagtccatttccactgtatcagtactgtgcaatgcaccttgtgcataaacttctttactagcctacagcaagtgtatgttgcaatatgcggagcctcgcaattggttgatcttttgagctgataaacccgtggagctcgtaggtgcaggaactggtggcgatcttgcccactatgagctgctgggagcagcaggcggatgacggtgaagaacaactaaacgaggtgtctttgagtctgttaacgttgtgcttcgaagtatttgctcttgaattttgatgtagacggctggatgttgtacttaatacttaagtacggcactgcgtaaggaaaataggatttcgagtttttgtgataaggtaagctgaaaagaagattaaaccgacctctttaaatcttcgtgccaacgcgtttctaatgtcattattgatccttcctgcggagttttacctatggataagttagaaagaattaatcgacacagatgtggctccccccaagtcgcttacaaaacaggtttgaaatttcatgcacagattgcacactatcaactttcccttgtccagatacttgagattctgacgaagggactcctaagcttaggaacagacgcagctcctggcccccttcatgcgttcgcgcccacaaagatcgagacgatgtagactacatcgtctcatgtaatgtgcgtgcgtgtggcttcaatgtgccagggacccccgggaaagctcggcagacgcgtcggagggagggaccccctacttgaccattctaccacacgcggcggctcttttctccatgcatgcgtccgcagcatctggaagtgtcctcactgtcgatgcgcttcccttcccacggtctcacttgagcttttgacccgcatccgccacaaaccgtcggaatccgcagctatgaagtccgtctcggagttgttcggcgacaggagcgacgtggctgtcaccgctgcggctgcagtgaccgtgggtctggggctctccctcctcctgcacagcaccaagaagagcaagatgagcgacactcgcaagctcccgcccatgcccaagaccacgctccccattctcaagaacatcctggacgccggtggcaacgccgagcgcttccacgactggctcaacgagcagtccatcgagttcgacaaccgcccgtggatgctctcgattcccggtcgccccgccaccatcgtgctctcgtcccctgaaatgttcgaggacgtgctcaagacccaggacgacgtgttcctgcgcggccccagcggccagtacatcagcttcgacctgttcggcaacggcatggtcatcacggacggagacctgtggttctaccaccgcaagacggccagccacctcttctccatgcagatgatgaaggacgtgatggaggccactgtacgcgagaagctggccgtgttcctggatgtgctgggcgtctaccaccagcgcggccagcagttcagcgccaagcaggagctgagccacttcaccatggacgtcatcgccaagatcgccttctccattgagctcaacacgctgaaggacagtccggaccgggaggacgaccacgagttcctgaaggcatttaacaaggcctgcgtggcgtttggtgtgcgtatccagtcccccatgtggctctggagactcaagagatacctgaacgtgggctgggagaaggtcttcaaggagaacaacacgatcatccagaacttcatcaacgacgtgatcgtgcagtccatgaacaagaaggcggagtattctgctaagggcgagaagatggtggcgagggacctcattacgctcttcatggagagcaatttgaggcacagtgaggacatccacatcgcggatgatgacgctacgatcatgagagatatggtcatgtccttcgcgtttgccggcaaggactcgacagcagacaacatgtgttggttcatcgtcaacatgaaccgctatcctgaagttttgaagaagatccgcgaagaaatgaaggagaaactgcctggtctcctcacgggtgagatcagggtgcccacgcaggagcagctccgtgatctcgtctacctggaggcggtgatgaaggagaacatgcggctccacccgtccacggcgttcatcatgcgtgaagctatggacaacacgacgctggtggacggcacgtttgttgagaagggccagacgctcatgatctcgtcctactgcaacgcgcgcaacaagaggacgtggggcgacgactgcctcgagttcaagccggagcgcatgatcgaccccgagacgggcaagctgcgcgtgctgtcgccctacgtcttcagcggctttggcgcgggccagcacgtgtgtatcggccagaagttcgccatgatggagatcaagacaacgctggccacgctctacagcaagtttgacatcaagacggtggaggacccatgggagatcacgtacgagttctcgctcaccatgccagtcaagggaggactgagcgtggaggtcacgccgctgacgcccttaaagcgggcgtcctcggcttgtaagtgaggcacaaaatagttatgaagttccaatgaaggcggcgattcgtgaatgagattgaaaggtagaagtgttgaaacgtgagctaatccgaggccatgtcgatattgatggggtgacgagacgcctgggttagttgtctttagtctgtccatgcgtgtgctgcgtcgcgtgagtcttgacgagtcttgactacggtactagttttttacatccatcagagtcagcgcttttcctgaaaagagtcttttgtttgcctacaagaacgattcttcctcttgcattcacgatttggcagcaacaagacaatgaaggttgaggagtgggcgttcctggacgaatggtgcggagcgatgagggaactctttgcatccacggagagctccgcgacagtgtggcagtggggaccggactacagcctagcactacgattcaccatcgttccccctcgaaccaagaagttgactccaaatgaacgtttaaagcagctcaagacacttcgtgaggggctcgctctatttgctgcagtggcgtggatcaacgttgacgcactgatctccttgctcaagtcaaatggcgtgtgcgaacccagagaagaggtgcagcaccacgagttcatgatggcggagctgcccgtattcgttgagctcgaagtaacgagcaagctctgcagtgaccaaagcaggggatctcgtgggtacaagaagacctcgtatctctgtgttgccaactggaccaacgtaataccagtcaagcattccaggaggcgtggacgaaagttgaagggctctgtagaaacaagtcacatcctctgaggggtatggtcattcctgtccgagtagttatcggtaagccagagtactttaaaaaatcggggagtgcgtcgcagcatgtttggaacgtcatgaagaacgtgcttagacctgatcaagtccaatggggatggttcaagccgaagttgggcagctctgtcacgctgacgagaacatgtcgctcttctttttacgcctcgtttgttgcggacgccgtgaacgcgaagaacgcgtcgacttccaatggtaccagtactgccttcatgacattgctcgctgaaatgggtcgtgaggtccgattttcagcgataaatgtatgtttcatgccacgccaagaccccctgaaagtttgccgaacgattgcaagtctattttgcaatgatacttgccccaatgcagccgtagtggggcattcaggtgtggattatgcggccgtgagctttcaagacgagattggacgcgaaatgaatgcgctgtgctcggctttggcggtgacgcgctcctgccagtccatcttcttcacgctgggctcgtacgatactgaatcaaacgtgaaaatgtggaggtggatcgcgtacgcgttcttctcgaatcgggctcgatcgcggtcctctgtgaagcaagtcacaatctacaacgcatggctcgattccaacacactgcatgctctgtccaaaatcctaacaagcgtcaatgcggagcaagagctgtttaccgctgctaaggggaccgggcggacaagtaacactacaactgacccacgcgaataccgtttgcgaaagaatgcagcgatccagagtactgaagagactaccggccgtgtggtttcgtggaattcagcagatattttccagcaagggggagtatgtggagtggtgctcgtgaatcccaatgacgatgaagaatccattgagtgggtcgacgtgctagttcccggagttggcttgtgtcaagttcaacgcaacaatctcgtagtgagcgacaacgtgaggatatcggaagtgcaacctgatctggagctggaacttcaattctcaaacttcaccaataatgggcatcttacgagtttactgaggctggttggagcgtatttgtgcagcctttggatcgagtttcctgtatggagagctggggttttactacgtttttcggggatcttgggggcctgtccgcatctgaaggaattaactcttcacaacggcatcatctcttctgatgggttggttcgggcgtgcgaacggtataacatgacacttcatcgtctggactgtcatttcgacgacatccaagttctcgtagcggcactgacggatgaatccaaaactctgacaaggacgctgcgctggttacactgcgacttgttcacgctaccaggtatgggttcttctgaggcgctgcacgtcttgacccgtatgctgagtgggaatagagtaatgcgctacttgacagtagtcgttgatgcacttcaaatggaaatgtttaagagttggactgaagcagttccatcttcaggatgtcgaagaaattgaggagatgccggccgcatgcaagttagccttcctcagtgtcttccgccctgatggagcgcactcaccactgaagaagcaaacaacagatcacctggagcattttcgtttgcacgccccagatatttacgtgacccccaagatttttgcgtttgccgcgaagcatgcaatgcgaaaggtgaatgtcatcatcgaccctagccgttgagtgtttgcaggcattggtttcggtagttttaacacaaaaagttgaaattcgggttcgctcgactacgaagctgttgctgttagacgaagattggtgaacctctgtggtcgaagctagatagactctaaaagcgcggcacatgcccaatttctgatgcttttcaactgcgtcaaaacctctctgatccgaaatcgtaaaactttttgcgaggtaaaccgaccacaatacagattttgagaaagggttcgacgcgttctttggcattcacggtttggcaataccgagttgaaggggctgacgattcccattcgagtcgttattggcagactagaccgcacaagaacttggagcactgcatcgcggcgtgtttgggataccacaaagtacacgctaaatcctgatcaagtgcaatgggggtggttttcgtcgttgttgggcagtccttctaccctggcgagaagataccgctctgccttctacgcctcatacgtcgtcgatgcgatcaagccgacgaacgcagtaagtgctgccttcatggagttggtgacagataccatggtatgggccgggaggtccagttttcagaactacatgtaaacttcagcaaaggtgtagttttcgagagagctcgtgtagcactgaggccatggatactcggagcccgcaggaacaaagtcattgaagcaggaacacgtgcattgtcccagccagttcacgcctacaccatgggcacaagtggtccttgcttgtggagatagctttctccatggcggcggtgcgcccaacttcctccactgctgctcagagggattcttctacggcgatgcgcacttcttcttgctgtgcggcgaggcgtgctgccctacgctcagctgcaacgcgagctgccctacgctctttgattctgacctggtagcgctcttcgtagcgctacgccgctcagccttgcgcgccttgatctcctcggcgcgacgcttcttgtccaagcatttagggaggtggcgagtattcaggtcatacgcgtgaaggtttattgcactcggcacatcggaacttgttctcctggtattctaagcacaggtggatgtagaaaataaattctgatttagaaatgaaaatagaaatagaaatgcgcactctcgcatcttacgcatttttgcgtcttacgccattttcagtcttaggtgtcgcagttggaacggtgcaagcaatatcaggcaatcagtgcagacctccatatttactcagtaaatgcagtacatatcagccaacacgctgatgatcagtattctatactacacctttgccagctcaaaccgaccaaattacaacacaaagtgctgttcactttggaattttctatttcatttctaaaatagaattagaaatagaaattcaaaactttgactttgcctcaaagtggatgctgtacgcaccaaagtggtcaactgccgtactccatcggctcaccgcgcttcgcagcagcgactacctgggcgcagtgaagcgccatcttgtttacaaggcgtaggtccatgcagttcatgcaaacctccgctgcttgctccagtaactgcatgcgcagctccgtcatctgaccgcggggagcactaagcatctcgtcgtgactcagcgcgaggaagcgcttgatcgcagctttcagcacgctgaagcaacctacaacagaaccgtacaggaccagcgttagtatgaacgcatagagtagccgtagaagtgttggacgcaccttcaatcggatgcacataggagaatacggcgcgagtcggaggagcacaaggtcgtcacgctcgcgcaccagctcctcggtctgggtgtgggccggggtatgtcaagcacaatgacgaccggcttacaagcaaagtgctgctggtaggtcgggtgcgccttcgcagcgtcgtagacagtgttgacggacgcagcgttctcctccatcttgatgctcccgcgctgagtctcgtagtgcagcagacctacatcggtagagaccgcgcactgaatttgcagattcttgcccttgctgggcggcagcttcactatggcgcgcttgcccttgagcgcccggccctgcatgcgctttcagtacagattgtagtttgcttcatcgtagtacacaatgagcaaaaacgtgctcaagtccacaccgatgcccacccacaccatcgtcttcagctgctcaagtatgagcaatcagtttgcctctacgtaggtgtgatatcggtaaatgactgcggccgggcgaattccggccgaggtctaactgccttgagcttgcgagtgatggctgaccgagggctctgattggtcggtcacattccccgcgcgttagtgcccagaagattgatagagactacggagtgacaggagggtcaaaataaaccgcctgccgaggcttccgaagtttcatagtgggtacactttatgcccagtaggagttcggatttaggacgaagtttcgtccggttgtaggatcagctcgaaagctcggtccaagcttgatatttgtatagaccttagggattagctataggagaggcctgttgcgggtcaggtaggtttacccttcgttaaaatataagagcacccttagccacgagccacggctaggatgcaatgtgtaatacgtgctttcgcactaaacctctgtggtccctcagaaaggaagggtaccaggccaatcgaagcctcttacaggggcgccggggcgtagcctcggctagaagtcaaatacactggagggggggtccttgcctcacacccagtcaaacgtacaactgtacacagaggtctctaatacctcccaacactcggccacctactcactcttggccttaccaggatgaacactcggtcaatgcaccttatgctcaccggcagacataccccgtgcagccgagtgtatccagaccctacgctaagcttagcgacttaccatagacggacttgacccttgtgtggcttggggggggggggaattctgctctgtttaatggtttagatgctgtcgggaatgggaggcacattccagcccgtataagggatcggacctggtcttcaggtttattatcccgacaatctatcgccgactcttcggagacggcgtgtgttgttggtagggctcgtcctagagacttcggttgatagggcgaggactcgtaaactcgtgttttcctacacgacaactggtgccgcgacccgggactggtgtgaccgattgtgtgttgtggtctgtgtaggttttcccaacgagcattgaggagagaagagaagaagaaacaaaaacaagaacaagaacaagatggcgaaaggatccaagtcagcggtaccagctacgccggtgaagtcgggacgaggatcggccgaaggttcgtcaacgatcgcgagtgacttaacgtctcggttgtcgacgttctccgaaaggtcggtcagttttgaagagtcggtcgacgaagattcggacgccaaggatgacatgatgatggactatgatgacctggaggagaagactccaacgacgacgcaggagttcggagatgaagaagatgcgatgctgtccgcgggacgtagcggaggctcgcgctccttgtcccggaacctcgtcgcggaatttgatgaagtggcgaaacccgaccatgcggatgacgactttgaggatggcaccgagacctcggcttcgagggctctggtgcaggttactaagggtccccaagaatcccgcggaagtcggcccgctatgaacagcagcactccagctgcgaacaaggtgctcggcagaatgctcgagcagatggtggagtcgagcgagtggatatggcagttcaatcccgagatgacgcgtcaagcgacttgggctgagctgaaggaggagttgcaacaccccgttgagtcgacctcagttactcaggtagccgaggacacggtgtctcttctacgagcgatgggctgcgagccaaggactcgtccgtccgaagtctcgatcaagagttggacaccgggtctcgccggcaaggagctgcataagtggaagaggaagcttcgcctgagcttcggggagtcgggcctgactctgggacgccccccgagtgctcgccccgcgagggagcaagctgatccttcgaagttcccactgccacagacacccaagaagtccgccgagcggtcaaaccaaagccaagtgacggacggagtgttctccgccaagaccgaaggttcgccgtacttccaagactcgcacatggtgactcctaggtcggcgagtcgagccgaccgtattgcacgtgagtccgaaagttcgcgacgcgagcggagcacgcaacgaagctccacactacgctcaagccgccggtttacaccgcgcgatgactcctcgtccgacgaggacgacaatgacaacatcgactatgaagatgggtttgacagcccgagcgatgagttggtccgtcaagtgcgcgaagtgagtgagatggagcgactgagttcgactcctcggctcgagatcgccacacaccggccgcttgcgcagatcaagaatttctcaggagcccgcaatcggagtgaaaacgctatgcagtggctccgagctttcgtctacgagatgaagggaacgcacactccgcctaacgagtggtgcatggctttcgagctgagccttcgggacggtgcccttcactggtaccgtcaactcccgaagaggactaagcgtcagtggaagcgactgagcgatgcgtttatcaagtactactgctcgcagtatagccagtctgcgaaggctcgctactactctgcgaagcgcgagtcctcggaacacctttgtgactacctcaaccgactgaatggttacgcccataatgctggcctacagttcgagaggggtggtcgcgatgcgaaggaccatgcacagcggttcctcgagacgtgcggtgaccgaagcctcgaacgccggctttgccacgttcgggtgaaggacattcacgaactcgaggacatgatcaacgacatcttcaagtctgcagagcgtgggcagtcgcgcgagacctcgtctcaccactcgcgcagtcgagaccaaccgcgtcgtcgtgatgaccgttgccacgaagcttcgcgtgacagttaccgccgcgaccgtggttacgaacgtactctcgccgccgagatgactcgcgccatgttccgcgcatttcgctagctgaagcttcgctgtcagacttggtcgctgaactgcaaggccgcggtaccaagggtggtagagccgagcgctcgtcgccacgccgtaccccgtacagcgacagcgagagtgacaccagtgattatcattactccgagagcgatccgagtgatggtggctacagtgacgttagcagctctggtgaggaaggagctcacgtcgctgctgccaatgaacgcgagcgacgccaagcagctgaaggaacgtacgctcgccctgaccaacgtcaacgcaagggtggtgaacccggccgaggattcgaccggagtaaccgccactccggctgagacaaccgtgatggtcgtccgcgtcagtacggaccgtgcgcagcttgtggtggagccgggcattcggctcactactgctactgccgctgccgactgtgccagcaggtgcatgacatcggcaagtgcgaagcacttcaagccctcacttcgttcatcaaaacgaaggccgagaagaaggacctctcgccagagctccaaagcctagtcttcagtggcaatttaaactaggcagcccgccaactgaaactgggttggtcccaatcgggctgccacagctgagcccgcgattgatgcagactgtgtctacgcattcgtgggcgaaagtaaacggccgaacgacaaggacaaggaatgtgtgaaaacgacggaaaatgaaaaggagaaaggagcaaccctcggtggaggtgtaacaagtgaaataaatgatgatgaagatgatgaagatgacaccgaggcttgggtctcaagtgtggtgcaagaaggacaccctggccgaacgcccagtggggtgacgaagttactcccaggcgagaggctggggtggtggtccgtgcagaagtttgataagagagctcggatgagagctctggtcaagggcgcggtaaatgacacgcgaacgaggattctattggacactggcgcgaatgttagtgtggtctccgaacggttcgcgaagcagttgcggttgcgtgatatccaaggccacggccgctgtatggaggttaagggttttacgaaaggaaccatgacaaccgagagacgaactctcgtgaaagtaaccctcggctggagcagagtgtacgcattcgaattgtggattatggatcatggtgctggtgtggatgtagtcctcggcaccgacatcatgattcctgcaggagtgcgcttggacttgttccacgcgaccgcgaggttgccggacaaggtgagtattccactcatgaagacgctgaatatgctgaatgaccaaggtgaaggcccgcacgtcaacggtggtccgtccgaggacctaatcattgagagccgagagttcgcagagtacagagtaccgaggcgtcaaccacctctggatacacacgaggtgtgggtacgtcgcacgaagtctctgttgcctacggtaacgaagtttcggcgaggcaaggtcgagagagtgcggttgacgaacgtgtcgaaacgttttacggtttgccgtgctcactcacctatgctaatgtgggtacgatcggagatctcccgaagtctgaaggttatgttcgactcagttcggaacgatacgaggactggcagaagttggcgtatgacggaagtcgggatgaaacggtgttcaagcgtgagtgtgatgcatatgcggattggctggcctctcagccttcggctgtggagcgaccggagtattaccccagccacccgaagcctcccagacgcacggccgccagctgagttgtgccgagcagtgggaacgtgaaatcgctaagcgtgaggagcaggagcaactcgcgaccgacggctcaccagtgggtgatggtccggtggcgctccctcccgtgcacatggaagccgatgacactagtaccgaaggttcaatcgagtctgagagtgaaggagcttcggatgccagcaccgatgacgacgcctcggacctaggggtgatagcgagccaagtgccagccgaaccctctgacgtaacggaggaccgttcagagtgaacagtccccggggtccgaagactcagcccaagatgaagcctcggtagcagtgctgacacgcaattatctgtcggcccccgccgttgtcgacgttggggttggagaagctgacgtcgaagctgtcaatgcccgagccgaacacttgcccaatgagatcaacttggaagattacgctcatgaactagctttcctgcccgaccttacagaagcctcggtcacggaactggactactcggctgagaatgtccggcatccggaactgagtagaggatggaaggatcgcttagtgaaggttctgaagaaacatgagaagatcatgatctctagtgggaatgctctaccaccgcctgcgtacggtgtagtgtgcgacatcgatgtacagggccatgcgcctatcaagcaacgagcacggaggattcccctccgacatctcaagaagctctacgagcttttgcgaggtttgctcaaggccggtctgatcgcgttctccaacagcccatggtcgtcaccgatcgtgattgtgctgaagaagaatggcgtagatatcagactatgcattgattacaagatggtgaacgcagtcaccgctatcatggagtatgcaatgccccttgtggatgatctgctcacagacctggagtctgtggtactgctcgcttgatgcagcgagtgggttctgggcaatcatgatgacacagagggctcgtcagatcgctgcttttgtgtgtgcactgggtcatttagagtggctcagaatgccctttgggcttaaaaatgcacctatgatctaccaacgaatgctcgacaacgctctgtggggctttgttcagccgaagggtgcctggaagcattatgcgcgtctggtggcagaagctgaagcacgcgaccgtgaactcaccgacgcctcgaccgaacagtcacatgaagagtcgtccgacccggaccagtcgcctacgaagtttgaagcgggacttggactcggatcgaacgaaagctcggtctcggaattaattaacagtcctattgcggacatgttcgcgaatggagagcccgacgagtcttcgttggtgccggttttcgaacggcgttcgtgcgttgacgacatttgctttagcggcgagtctttcgatatatgtctagcgacgctcgatcgactactcgcccggttcgaggaatgtcggatcagcgtgagtttcaccaagagcatttttgcgcagcccaaggtggacttcccgtctcacgaagtgtcccggagtggtattagagtggacccaaagaagttgaaggctatcaccgagctgtccttcccaaggtccaagaagggagtgcaagatttccttggcgctctgaactactacagccgcttcatacaggactttgctgtctacggtgacgcgctataccagctgcgagacgaagacttcgcaccagggggtgacctctctgcagccaagcgaagctttgcggcattgcaacgaaaggtcggtgaggcacctgtcctccgacacttcgaccgtgaccgagaggtccatgtgacgctgtttgcaaatgaatgggcagtgagcaccacgctcatgcaggagcacgatggcctgatgcaccctgtgcgtttctgcggccgagtgctcaaggacgccgagatgaactaccagccggcggaaaaggaggtactggctttgctacagctgttgaaggtgtgttacacccagctggccggtcggaccatacatgtctacacgcggttttcgacgctcgactgggtccacaagtcgaagacactctccggacgtgcaacgcaattttccgtcttactgtctccgtggagtctagtggtgcaacgagtcaaggaaaaggattgcgccttcgcgcagctcttacagtcgacgatcacaagcttcgttgacctcgaagcctcgttggcaccagtgacccctcgagccaaaagctcgccgagtgttcggatggatctgcatttgctttatgcacggttgccacgtacatacagtggctacgtactttcgtttgatggctcggcgaagatcgagaagcatggtggctgtggcaattgcgcctggatactatggcgacttcctgaatggagtgtagtgatcgctgcgagtgcgtatctcgggaccacgactgtaaacctcgctgagtacaccggaatgaacaacggggtctctgccgccctagaacatggggccgaggacttagtcaatgtcggggactcgagactcgcaatccagcaatccctaggggtgatcgcttgccgtaaggagtcgctgatggcacaactgaacaagcacaaggaactgaccgcgagacttcggtccgtgaagtacctacatgctatccgagagttcaatgcagctgcagactctttggcgagcgaaaccttggagaagaaggtgtcgatgacggtgaacagcgaagaccgaaaacgagagttgatggaattaaatcggatccgagaagtgctctatgaaccgtcagccgaagcctctgaagcttctggagaagtcgtaacgcgtcacgtgaactcgatacgtgtgatggatacgcgtgacagtgacagtagtaagatttttttcgattttgtatgggatactgggcatgtagccgcggtaacgaggcaacaagcccgcgcgcgcgcgaaacaagtgcgctttgccgatgaaacttcgggtgatgaaccagaagagggagccgaaggagacgaaggtaataatgtcagcaacgaagagtctaacgaacttccagaccaaccgagacctgacgcaacggtggtccatgaaccgagtgctgacgacatcgacccactagctgtgcaggaagaacggcgcaggcgcattggcacagccaggatgaggagctccggtggtcaaacctcaagacggtgctaaagggagaagaagcgaagcttgcctacaaagctgcacgcgaagcctggaagatggctgacaagttcctgttaagcgaagatggcttgctgtatttccttggtgcgaaccgtcggtggggtcgcgaccgggccgaggagacgacactacgcctagtggtgccaacaacgatggttcaggagatccgacagaactgtcatgactcgttggagggcggccaccaaggtatcgtccgaacctaccaccgagtcaaggctgactactattggattggcttgttcgccgatgtggagaaacacgtacgctcgtgtccagactgtagctcaagcaagagtcgcccgcagctacgtgggtactccccaggcaacattctggccgagcgtccgctacaaattgtctcgatggattttgtgatacccctaccgaagactcggcggggcaataccgcactgctactgtttcagtgtgcgttcactggattcgtcatgggcaaggcgatggcggacacatctgcactctgtgtagcacaagcattcgaagagtgcgtgtaccgaaggttcggagcgccgtctctgatcaggcatgaccgagacccgcgcttcatgagcgaggtcttccaaaccttcgccgagatgatgcagtcgagatctagggctacgttgagctatcggccgcaggctaacggccagcaggaacgctcggtcaagaccgtaatgcaatcggtgcgagtgtacgcggaggacccgctgcaacaagactgggatgaaattgtggagaagttgatctttgcgattaacaactcacagaacgccacgaggaaggacacgcccttttacttggtacacggatgggacgcaaggtccaccctccgagcaatgtcctcatcactgaagcgaggtgtcgggggacagtccgatgcattggcgtggcgccgaggggtcaacaggcaacaggcggttgcgttggaaatggctaaagagtaccaagcagtcgagaaagctcggcgtgcccaaaagcataacgaggctttgagccgagcggaacgtgctgcgcttccaccttccgcgactggtgaaacctcggaaggtgttccgacaggtgcagagggtgagggtgactcaccagaccccgcaccgaagtctctcttccagcctggtgatcgtgcgtggctttacatggaacgcgtcaagccagggttgaccaagaagttggcccatcgatggcatggtccctcccgcatcaaacagaaggttgacgagtatgcgtacgaattggatttgcctgacaagagtggttatcggttctacccggtagtgcatgtgtctcggttgaggcggtgaacgagtttggcgatcgaccgaagactcgactcgccgctgaggttaccgaggagacgcgactagacttcgacgaggagttactcccggaggatagttgggaacccgaccacctggcgggcgagtatgaggttgaagccatcctggatgaccgaattcccctctcgacgagcactgagcgagccgtccaagagttcaaggtgaagtgggtcggctatgacgaaccctcgtgggagcccgcgtcgaatctgtcttgtggcggactgctgtatgactatctacgcgagaaatgacgtgaccgaaggttgcaaatggtccaagtcgctgacgaggactagttgcacccctctcacaatgatgaactgccggcagggctacgcagcctaccccagcagacgaaacatgttactgcgggaagaagattgtatatttgtatgttgaagtggacaagactttacgaagtggagatcacgactggagaaactatggagaacagctgaagaaggacaaacgactactgaattgcatgggcgagctagttatactacgaacgaactgtctgaataccttgatctagctcgacacaaacatgaaggaacgatggagaactggaacgaagtttaggcgcccgaagacgaggcaaccttggccaaaacgcagagacgcgcagccggagaagcgtcggctggcgtcgcagcttgatcagcagcactgggaggcgaacgtggcgcgtcagccagagtcccgctggctggggcctcctcagaagggccctccgtaaccgcgacgcgatcttgaaccgagtcctgcgttgctgttgctgcatcttgagctcctagcgcttgtgtagcttcgaccgaggtctcttgagcatccacggcgcggcgagattcgtcctgaacctcttccgaagactcttcagcaaccggagactcgatctcttcgatcagctcctcgacctcctcctcttccgagatttcgtcttcacccggctgcccggcctcctgcagaccgaaaggaggcccgtgaaagttcgtgaactcacgcacccacggagccgtaacacggcgagggtccagcactgggttgaccgtaatagctgtcgcgacttcacgaacagtcatgccacgcgggacgaagagtggaaccctggggttacacggagcgaaggttgtgttgtacgggtgctcggacggcacatcggtgacgcaccaagtcgaccatcagctgagcgaagtttgcgaagcgtcgttccgaatgttcgcggagctctttgacctcagcctgcacctcgtggtggacgatgtcttcgacagcgtaccactgcgcagaagaacgcggaggaagtccctaagcctcgtgcgcagttgcaggcagcgggtcacccgtgcggcagaagtgtgcagtatttgacgaaggctcgtgcagaggactggagtcgggcgaggacctgaggaccagctgagtacacgcagggtccgacgaagcccagctagcggacggcaaagcgggaggtggcaacgtcggagccactgcactcgaagccgaggtctctccggtgcttgcagccaaagcatggtgcgcgacgaccgaaggtgcggcctggagaccgcccgccaccccgcgtgctcctgcagaggcgggagttggtgacggagcaggtccggcgctgccaccagcaccagacgatggcgctgaagctacagaaactgcagtcgaagcctggagccgtcggggcgccccgcttgctgacgcagaggcgggagttggcaccgccgaggcctccgaggccggctccgacgagtcgatgacctgccccgtggggccacgcaattgagtgtcctgcagcaagatgtagcaagttgaagacggttagacgcgatgaagagatcaaacacagcactcaagcacctcgcacgaagactcacctggacgactggaccgaggtccgggaaggtgaagggcggcgcgctgccaggaccaccggaggactgcatggcgtcggagcgcagaggggcacgaagccaacacggcactcaccacttgggacggctcgggccgagttgggggccgctgtgatatcgagaaatgacctcggccgggcgagttccggccgaggtctaactgccttgagcttgcgagtgatggctgaccgagggctctgattggtcggccacattccccgcgcgttagtgcccagaagattgatagagactacggagtgacaggagggtctcggcgggtcaaaataaaccgcctgccgaggcctccgaagtttcatagtgggtacactttatgcccagtaggagttcggatttaggacgaagtttcgtccggttgtaggatcagctcgaaagctcggtccacgttgatatttgtatagaccttagggattagctataggagaggcctgacagcctctaaaccattaaacagagcagaattcccccccaagctacacaagggtcaagtccgtctacggtaagtcgctaagcttagcatagggtctggatacactcggctgcacggggtatgtctgccggtgagcataaggtgcaatgaccgagtgttcatcctggtaaggccaagagtgagtaggtggccgagtgttgggaggtattagagacctctgtgtgcagttgtacgtttgactgggtgtgaggcaaggaccccccccccccagtgtatttgacttctagccgaggcttcgccccggcgcccctgtaagaggcttcgattggcctggtacccatcctttctgagggaccacagaggtttagtgcgaaagcacgtattacacattgcatcctagccgtggctcgtggctaagggtgctcttatattataacgaagggtaaacctacctgacccgcagcacacagggaggcacattccagcccgtataagggatcggacctggtcttcaggtttattatcccgacaatctatcgccgactcttcggagacggcgtgtgttgttggtagggctcgtcctagagacttcggttgatagggcgaggagtcgtaaactcgtgttttcctagactacataggcgaccagcgccgcctcaatctctggggtgcacttgatgttcgccgcccgagagccgccgcgctgcttcacctccgggctcccgctcatgacgatgcggcgagcagtagtccgggggatgccattgtgcttgacgacaagttcccagtccaccccctgctgatgggcgtcttggacccgcgcgcgagctgcgaggctgtgcttgggctccttaggcatgagccagtcgaggtgagttgaaaagtgacagcactctgagtgctggcgctcgagttctgctctccagtcgttctcgattgctggtgcgtgcacgcggggtctccgcatccagtcgtagtccgtttgaactttagaaattccgctttgacctaaaacttaaagtttaaaatgacatttgaatttccatcgttacaggtatatttgccaaattgaattgcactaagaccaccttgaagtggcaaaggtgtagtacactcacttagttgatgaaacgggtcgatctacttaacagaagaatcgtgagaatgttctggtcgatggcaacatacagttacacatctgtgtgttccagtataatggtacactgatatctttggtagcagcgtggcccacacagtgtgggtacggaagacaagaggcctttggatagcccagaggcgatgttaatagagggttgtcacgctagcggacgggttagggcatctaggagagggtgatagaaggagcgccatgtccatgactggtgttctgggaatgcaccctcaagttcctcattcttcaactccccctgtcaagcaacaatggggaagcgcaagcgcacggacgaagatgtggtcttcatggagtctcgcgtccaggcccgggcctgtctccactaggacataatggagaaaatccagcgatgctgtcaagtcttcaaacagtggtaactggaagcttcacacgtcgccaaccttacgttcttcggtgcctcgagggggggggggggtcccgctgcccaagatcgacggcactttcctcatgtgcaggcatgtccgcagggggcattttgcaaatcatgccccttttggtaatacggggtacacctgggacttttcaaaggggtacccgatcagtattgtatgtctgtgtatacaaaactagaaaggggcactacgaacctgtataagaatgtataggtggtgacctacgctagagtgctcggcttggagggcgacaagcactagacaactgcctacctggacatctcgtctggcatcggctcaaagtattgtcgagattgcgactcaccttccatcgcgtagttgctattcctaccacgatgtaggcccgtcgtacgcttcagcgtgctgtggtcactctccactgcgtgggtctctagcgtcagtatcgagatcttcaacgtggacacgaccgacgccggcatccacggcgccatgccgatctgctgccagtgctagggctactcgaacggctacaactccacctggcgcaacgtcggtcgcggccaccagtactgctgcgagggcgacaatgttatgttcgaccagcgcatgagcacgttgaacgcgtggggcgctgacgcgcgcaccaagatcgctcagcagtccaagcagtccacggccacgtggaagatcgtcaacgcgcactacagcacgcaccaccacttcgtcaagtacaacgtgaagaagtggttcggcctgctgcgcggctcaggcgtgcacatgtggcccaacggccacacacggcgactgtcgctagacatccacctcctcgagaacggcgctggtggcggtttccagaaggattcagccagcggctacccgtcgtacgcggcatgcgtacacaactttgtaacctgctctaggtttccgtacacccaacgctatgacttcagtaacctatgtctacattcgccacgaggcagcagagctatcaccatcacttcactgataaaggttattcatcgtcagaagttagtgggctggaaggtaagcggtaagaacttgttaagcacatcttacggcaacggccctgtgtggtggtctcatttctctgctctccgacggtcgtactgttaaatagcgctatagaattgaatgagcactacttaaggcggttggtcgctttgatcttgtccacattcatagagccgttttccgtgttcctctcgtgtttatactgcatcgttcgcacaaacccacccagagcgagtatcgcgattgcgaaccttgcttcgcgctgtgagcgttgtccaagtagcttaacagacaactatagtaggaaggtttgtatggcggtctatcatgcccatttcagggagtaatctgaagtaggcgaagtaatgacaacgtgccagttctggtgacctatttgctagtacagtcgcatatatgcatgtgctggcgtcctaacttacgctactaggtcgaaaatgtgacgaaacgtacaacatattcccttcatcaccaggatttccttagttaagagggggcactcttggcaactttaaaaggggtatttcgttctttttctgtccacactaccccctccggacatgcctgctcatgtggtgcatcaggggagtgtgcgcggaaggtcttcaagagcgcgatcgcaagtctcaaaagccggaagccgaacgacaacgcgctctgaatcgccccgtcgacccagcggctcgcgagacagtcacgatctaccgcgagatgcgatccgccgttgcagactacatcccccactccagttaccttacagtggacaggggggggtcagtgccatgaccgcggacatggtcggcaacgcggtggtcatggtgcaggagcacttcatgaagcgtctgacggcgtatattcgcctcgagttgtttcgtcggaccggtgcggcaccccgatccgaggtggagcgtcttcgaactgcgtgctttggtcctgatgatggcgactatgcggaagacgaacatgagcttcgagagtggctgggtttccgcccctacaaggacgagctcaagcgaagcatgtctgtgactctgacctgaacttcatgagatccttggccatatcgaggccctacgccgtgagatggcagagttacccgggtcttcaggtggagtcgatctcaatgtgtcaccgcaagacgaagttgctctgggcgacgagcccgaatcggatgaggacttcatccaggagctgcgttcccgaaagggactccgggcattcacgcttttgccagtctcgacctcgtttgtgccgatggacgtggccttcgacggcttcacgttgcaggggttctgcgctcggctttacaacagaacttggtccaaccctgtcgggatccctgtcggagcgcacggggtacttgcaagaccgcaagtcgtcacgcagctggtcgacttttatcttcgcagagcatttgctgtagtttgagaccgagaactgcaagttcgcatatcgcgtcgcgccgaacgggtactcggtttcgatactcttgacaagaccgaagaacgcgattgaggtcgagctcgagcgactcaaagctacacgaacccaagaaatcaatgatcaggcggcgaagcgagcaaggctgcgcaaggctcaaacgcgcaagaaccctcgtggccgtcaatgtacctcgcgctcagaccgccagcaaccgcttcccaacgactggaacattctgccagcggattacgaggccgacaggttggtcgcgattgaccctggaatgcgggccatggctacggcggtgtgtgaagacatcgcaccaatggacgagaccgccatggagcagaggcgtcagcgcaacaggcgtcgcaatcgtcggcgggctgcacgtcgcaaggcactgctacggatcgcccggcggaggaaacggttgtcgaggagaacccgtgctcgaatcaagcgcgcaaagagacaagctcggcgtcctccaacctccccacgcgtgcgtcatgttggtgacgagaccgtcatctccattaagacccgcgagtaccgacatctcgctggcttcaacaaagccatgcactggtttgaagggctgaagtagcgagagcctcggtacgctcaagcaatcaacccggtgccgttctacaaaacggcatcctatgacatttacctggagcgcctacaggtattgctgcatcgcatggactttctacaggagttttcgcggactcacggatttctgaaatggaggttcttccagaagagaacgaaggtgaaggccctggacaccctcgcgtctcgcatcgtacccgttgccagtccgagagggccggtcggctacggcaactggagccggtcgcagggcgtctccagccgcgcaccgggaccagtgaaggcgttaaggaagcactcgctcgcctcgccagtgtcgtgctcgtggacgagttccgcacgagcaagctgtgctctcgatgctatcaacccttgacggaaccctaccttccaacacggaagaacggcagcttcgcagctactatcaagaggaccaagaacgtcttgtgctacttccgcagtcaatgcgagacgttcatctgggaccgtgacgtcaacgctgcgcacaacatcatgacactacccaaggatcgcttcaacggacatcctagacgatcagagtttgcacgcggagtctagatattgcgggatcgtggacgataagggctcgtcgcggtaccaatgtaggtagaatccgatagttttcagaagagcgtcgtacgcttgaggtccgacaaaggaccctctctaatgtaaccttattccccatgcgtcaacgggactcccaacaggtttgccgcatgatatcaaaactgctttgtgaggacacttgtcacggtccagccgtggactgtgggtcatgcgcgagtggcaagagaggaatggagtggaaatgaatgcgctttgctcggctttggcagtcacgcgttcgtgccgagcaatcagattcaacctctttcgtatgactcgccgaaagtgtgtcaatgggtggcttacgcgttttactcgacccgagctcgatcgcgctcctccatgaagcaagtcagaatctgtaacgctcgtctgaatttcaaaatactaatgccgtgcttaccacggggaagctctggattttcttcaacttttgttatttttgtatgtgttgtacacttgatcagtatttttttaatctagctattgcgcaaaaaaggaaaattaagggaaattaagtgcgcattcgagtgttgcaagcaacttggcacctgtggcgcaccaggtactcgcgccgacttctgctttctacaacattcttgaaggatggaaaacacgttgggtgagtagttatcgataaatgttctactaactacaaaatacctacagtttacatactaaatccttgacatccaaatccgatgtgtaagaggaggtagacgctccgtaaacaaaatatttttttaatatacatttagcttcggacgacgttcaatatctataaatccattaggcctgtagtaatttacagatcatgttgtgcaaggcgggttttaaatgttgaagcatcgtactttcgatcgttcattctcgctacaaccttctataacgagtatttcaatgtactataggagagaaactccactagattgggttcgagtatcagttgggttcttaatacaccacgaagatcgaggtccgagttaacggaaaacgtaaatttgtatatcgcttattattgaaatgaccactttaattattagaaagacatacaaataggaggagatatagctccgtgacatacaggtctgaatattttgtagtaagctagttacgtactacaaaaccactttgatgacgtcctggcatgtgcaagtcttcgaaccatggaagcacccaaacgttgcgcagagccggttcacaacgcctttcatgccgttagtgttctccctagcaagcagaacttggaccaaactactttttatctgtcggtacttacggtaattttgcgtaacgtttctaaaaaggcaaacggtattgtgatttgctgttattttgcagaccattttagacgcaaaatatggcaaatcctgctcctaaatatgtgggaaagaagatacacgacctgctaaaattatgcataaatccacctcctcatatatatatcgacttgggagggcctgtcagcagccatgcattggcccagtacaccaccgtccatgatccccagcacatccaccctcttatgcataattgccgtgtgtgtaggtgtttgtgcataaaaaccgacagaattgcagctgcacacccacaattgcactttccaaagtgcaattgtggcgcttttagcgtaattctaggcctccacccatttatgcacctcgatttatcgtaaatctagcaggtggtcgctataaatacagcaaatctcgcctcatattgccaaactctgcaaagcacaataccaaagacaagtgtaattttgaagataaaacgaccggatcctgcttgccgtatttgacaaaatatacatggtgcaaaatgtaaacaaaaatagaaggagtgttttgaagccttgatcatgtgattttcaatgttaagatgtcttttagccagtccgaaatgttaacatgctaaacttaacatcaagtttgctgtttctataaagttatagagtaggcacggtttggttgaggtatacatattggcttaggtacaatagctttgcatattgagctaattatactgagataggaagcaacgttagtgctgctatcgcagaccaaataggattatatccgtggtacatcaagtcaaacgatgacccctcttgacatctaactggtatatttcttgaaaccggtacggctctggtgccgccctgggccctccagggcagattgaaccggtgtaataccgacgacactggtatgaatcagtgcatatattgagcagggtacggatggacgaagagaacgcttggactgtacaatagcactagaggtactcaataagtatttgcattttctacaagctgcaaaacagatctcaaccaaggttcgcatttttaattttgtaaagcattgccggtagacagtttgaactggcaaatatccgggcagatgctgcggctgcgaagcaggcgcaggagatgaccgtagctaataaaaaataatgaaaaataaaaagaagggtttatactaaaattctcctatcccagccttcgcggagccctagtatcagattcgaaaggagatattcaattcgagaagggtacgctatttaccgctatccgttagtttatcgtacttaggtttgggcatcttgcgctagtttgggttttacgtgcaatacgttggagtaagtttaagtcggatttactattaatatccccgttggttgaatacgcagagttcgaatttcgaacttcgaaagccaaacacagcgaagcaatccttctaatgttagatagtgcaaccctctagatgtccaagtcacaccgaaatcacatttggttgcattcgtcgcatccacttgtcagacttttgcccctgacaagtctcggcttgatgggtgatgaaatctaatttctaatcagtttcgaaatatcgtgtatggctccagaagctacgctctacaatgtaataaatgaatgtggttacgtgcgctgttatgatcccaaaataataatcttgcagcatttgaggtgttgctagtttggattgtaaagtaaccaatgatgaccccaggctatgcttcggctagtcatgtcacgctacccactcccatcatgtgcagatactagctagctaacgactaactaggctctgccaccaaaacgccgcgcaaatgttgaagtcgcatacgcctggacagtaccatgtttctcgttaatcgttacatacttcacaatttttgtgcattaaatattaaacgttctccagaatcaagtttcctcaaaataaaggctccgatagattattatgccgttcatcgtctatagttcagtactgcgttagaagttgaatagtacttgtacaggcgcatgcttaagctgggattgtattctcactattgaaggcctcggtatgaccgtacagataaaaccgaagttctcgtgaactcctacgtgtagcaccccatctcttaaatttgtttggtggaggctgtgtgctgtttcgcgcttgcttgttgctttgtagcttgagagtaaatgcaaaactgagattgactagttatgcctcagaatattcgaaccaatcccttcctatgtagtgtttctcctgctactccttgtcgcgcatcttcatcgcgctgtgcgtctccgcgctgcggcaagggtacccgatctgctcccatgcgtctccgcggcgcggcaaccaaagcacgatcggatttttgctgtttccacgctgcggcaaccgcaacggatgtgctctgctgcttctgcactgcgaatcctgacgaatccccacacagcctcccaaggaccccgtcgctaggtgatcagcaagccggagacagaacagcttgcccggttacatgctataggttgttgtaggcaacggaaagacttcatcggcaatcctcgaggtgtagtgagccactttggtcggaacttgatcatcaatggcggtcaatggctcccacgaatcatcttcgtcttggaggccgacgcaagacaccagtagctgccacccaccgcgcgctttgcggtgctccttgatggactccacaccaagaagcattccttggttcccaacctgcgcaagcatcttctcgttcacatcgagactgctgtcgctgtagaatttcagacgcgaaccatgcacttcgaaggtctggttcgtcaccaagtgccagatgacaaacgaatggggccgagtttccatcacctcgaaggttccaactcatctagccagtagtttgttcaccgcaagtctctggtcgatgcgagaccaaagcgcgtagtcaccaaaggtgaagttgcacggcgagtccttggagcgctgcatgttggcgagacgtcgcttctcacgtatgtcgatcacctcacgatgcatcgcagcaaggtcggaacgacggcagtcgagccgtttgtgtggcaactgagtgtcctccgtgatcaagacatgcttcccatccctctccaccacaaccggttcaaacggagtggaccggcgaagacccgtaaacagctctgcaggtgatcgattgcccagcgaggccaccggagtgtggttcaggttgccctgctccagaggttgcagatacatccatgcatgagtgtccagcttgaactccatcaatggtacccacatcacctgcaacaggtggtggttgaccctctccactgtcccgttgatccatggcgagtacgccaccaccagctcctgtagtatttgtagctgtttgcagacttggtcatcattcttgaagtgacttccctcgtcagaaatcagcagcgaaggaacaccgaaccgcttccacaagtccacgagagccgttgctaccatggtgctggtcgcggaatcacacgccacaactcgcagtattgcgagagaccgtccttcagcactaagatgtacttgctggcgcctgcattctgccccatgtagagaaaatcccagtgcagtagttcttttcactccgttgcgttgtaggtggggccccacggacgtgtgatgatgttagcacccttcatgtgcttgcagagcagatagcgactgaggaaccgccggcacaatgataccaaaccgctgatccagaacaccgactggaccgtcgaaaccattggccccaggccacgatggccctgcacactacagtgtctcaccatgagaatatgctggagtagctcaacagcgctcgcaggaactcagatgcggtcaaccaccaacagtaaaccgctttcatcacactcagtaccctgcgtctgaccaccccgagttgtttttgtgcagctcgaactgcatcgagcgaagggacttcaaagtcagctggcatcatgtgaggttgtgatgaagcggctccaggttggtattggtcggcttcagtaggcgcatcaacatccgcctccgtagcttgtgatacaatctagtcgcagcttcggcgagttcgtgagcccgacttctcgtgatgaacttgcactgcaccctaacacccacctccttaacgggaagatcacacctagaaaggagatcggcccacagattatccacaccatcaatgtgctcaacctggaaggccaggccagtgagcgacagcgccgagcgctgtagcttcccgcgtacatggcgtttcacctccttctccggtgcaaagactaaggctatattcttgtggtcgcaataaaggcggaagcctccacggcgagccaacaggtagcccccgcgtagatgattggataagcttccatttcaataatgctccaccgctgctccgtgtcactgaacactccactcttgcaaagcagcaactcatgacgctgttccacaaccggtagggcatcatcccataccctgacttgagatgttactagtccccagcctcgttcagaagcgtcactgaaaacgaagatattcgcagtgtcctccgggaagtgcagcagctgcttggttgcgagaagcggccgagccgtatcaaacgccgacctctcattgactgtccacgtcaacataaattctgcggccaggcgcttcgtgcgatccacttgcttcagcgcggcctctagcatttcatggagtggctgcctggtcctgctgtagaccataattgagtcacgtagccagccggcagcgcagaggaaccacggtaggtcggcggcagtcactggtaatgggaggttccgtagggcgctgacacgagcagggtcatgctcaataacctcgccgctaaacaatcgtccacaccacttcgtcgtcttcttgaagagacagctcttgcgcaggctaagcgtgagccgagcctcctggacgcactaaaatttcacgcagcgcaccaaggaactccgtgggcgagcgagaatagaccaacaggtcgtcgatccaggcgagaagcttcacgtacatgttcctgaaggccacctccatctggttttggaaatggagcgccgaatcagtggcgccctgcggaacacgggtcggagtgtagacagcatcatccgtcacgaacctcatcagctcttgactgtcggggtgaagcggaagttgcgtgaaacctttggtcatgtccaagccctgaagttgcgggcggcagcagccagatccggcgccgtgccagcgatcggcacggtcacagtattgacaggcctgtagtcgatattcaacctgaattcattcggccaaccagccttcggcactgataccgcagcacaagcccaatggctttgctggtttcggcgtattcacaggtcgaagacatgtgcttggccccggcaaaaaacttgtaacattccaaaaccgggtaccaaaccgggtctctctttcttaattgtaatgtttaagctaatatctgccggaatcgggtacccgtcgataaatgctaagatttatgcacactatttaccaaaacctgcattcaagcacttacggacgtccagtacactaatggcttcgctgaaggcgtaccaatttgcgccataatcgaccaagcttagctgaagatgaccaacacgatttatgtaggtgcaggctgcattttttacatgtcaatttgctcaatacccaatcactcttagccgaagatgcccaacctcgtttctgtcgccaaaccaatcagctcaactcgacagtgacacgagcatcgttcgtttgaataagacttttttccctgcgttgaagcatccacttccaaggaattggcccattagcgtatttctcattccgcaatttaccccaagccctcaagttaaaagtttgtttgtttgtttgttttgttattgaattgaggatcattattgtcacttagctaacatcctcaagttaaaaggtcaagatcagcgcaccatgcgcctctccttcgttccgctactgttgctctctcgtctgatcgttagcacacaacctagttcaaaaatgagcacagtataccttacctgcaaagtgaatgaaatagctctctcgttgctggggccaacgcagccattggacgctgaccagggtgttatgtgacataacactctggtcagtgttcgaaggcataacatatgtcaccgatggcctcatcagaccaggcaacctcaattggcgactttcggttcctgagaacccaccacgataaagaagagcggggcttgctggttaccagcctcacaaaggtttggctgaaacatcatttccgtatcgatacacttcgacgtgcgcaactatttgttcaattacgcattctcgggaagatgatgcaactatttgttcaattacgcattctcgggaagatgctgcggggcgcagtagatgcccacgttagaatcaactagagagttgggctggtagtgcttttaaggattaaaaagaaaacaactttaggatttactcaattattatccattatcatcgtccatgaaactattcgtcgacctgtgtaccctcccggggcaacgctccgggttgcctataaactccatgtccagtagctgctgcgtgtgatcgcgaaggaaatcactctgcgcagcagcatagcaccgaggccgtgttcgatatggctgagcaccttcgcgaatcgtgatatgcagcgcctcgacgttggccgggggatcatcccccagatcaatgcggaaaacgtcttcgtactccagcactagatcgagcagtgcaggacgtactcgaccgggaacccttcatcaccagccgtaaccaccatggtcttaagtaggtcatgcacttcagccagagcattggctcaaggttcatcaacttcaaaagagccatggtcctccatgactcgacctccagccaagtgagatagctgtgcgctcacatcaatgccgagatagacagtcatgccgttgcccaaaatgaaatcttcctcgtcaccttcaaacatgaggcaggtcacttcagtgaggtggactggaccagcaattgtctgcagcatcaagtccaacttcaccgaatcgcggcgcccccagcaacagtgacatcgacgatagtacgaaaatgcatatttttgtcatttctgtgtactgaaatgctattttttgtcatcagaatatgttgtcctcacacttcaattatgtcatgtgttttctatgataattatacttctaatttgtatgatgcagctaaaaaatacagtagttaagtaaacattttgaaaattctgtcttttgtcaaacaactggacatttttattgtcacgaaaatgacctacttttgtcatcacaattcgatacgtttacggcgggtgtgctttttatcatctacggtaagttcgggtcgaatcgcgtcgctggagaaactctggatctaaagtccagagaactggagacaatgtcaaggatcctaacagcctccaacacggagcaggagcttctcgccgttgctaaagggctgggtagctcaagtttcacggcacgcgacgcgcgcgagtaccacttgcgtcgggacgctatcgtccgagttacagaagaaatcgaccgtcgcgtggtttcgtggaattcagcagatattttccagcacggggaagttggtggggtcgttttggtaaagtccgaggatgatgttcccactgagtgggtcgacatgctgatctctggaattggtttgtgccaagtccaacgcagtagtctcgtagtgtgcgaccacgcgaggatctcggaaatgaacccgatctggaactaaagctcaaaccctgggatatctcgagtagcgaatgtcttacgaggttattgcaactgattgggggccatctgcgcagcctttggcttgattttccttcgtggagtcttggcgtcgatgttgctgtaattttgtagtcgtgtccacacctacaggaactagcgatccgtaataatcaggtctctattaggacctctgctttggttcgggcatgtgaacagcacaacacgacactgagacgtctggagtgtcgcatcgacaacatcaacattcttgcagcggtgatgaaaagcggacgtataggacgttccgctggttgcactatgaccttacgttgatgccaggccaggcctatgctgaagcggtgcaagccttgacgcaaaggctgcccggaaataaggcgttgcggtagtggcgcctgagatcgacacaattggagctgggttgatgcagttcaaccaccaggagctcgaaggacatggcgagttggaaagttggccttcttgagtgttttccacacctatgaagcgcactcgccaccgaagaagcaagcgaaagaccagtcggaacgtgttcgcctccacgcccctgacaaccacgtagccaccatgattttgaggtttgccgcaaagtatgcagcccacaggtgaatgtcatcaccgctagtggttagccctttcgtcgacctcttacttaaattatactatacaaatgtgagctattttcgtgtaaaagggcgctaaaagcgctcttttagtaaatcacggtacatgtacgatggcgaatgcacgatgtctgggcttgtgatatagacagtcggttctctagaagggcgcagagtgcgcccttctagatatttactgtacttcgagtggtagtttttgattcgccaaaaatttccataccatacgactacccaaattaaatgggttccacgtaccatacgtcgtattttacgggagtaaaaaaaatatcttctcgcatcatgaccctattcccgctgaccaagaaggcgctgtcggtgcgcaaggacccccagcacgtcatctggtggacgagaacgcggaggagactgcgcttctggagcgggttgaggcttacctcaaggcggtgggccaggatctgcgggcgcacaacatccgtcgtgacgttctcggtccgcccgcagaacattgagaacgtctcggtgcacaacgcctacatcgcgctgtacccgaacatctacacgtcccccggccgcctgaacaatagcgaggacaacattggaggcgccgctcgcctacaagctggagctgcgtcgcctccagaactacagcgtcaccccgttgacgtccgagaacaagaaagttcacctgtacctggccaagatgaaggagtccgactcgcacatcgtgaccgaccgcttccagcgcatcttcgtgcgtcagctggaccacgatggcagcggctctcgctcgcagtacgacacctacccgggccccaagcgctcgctggttgacgctctgaatgccctggaggtgaaccttgccaaccctctggtcaagaagtcgtcgctgccgaccaagaacaaccacgtgtacctgaacatcctgccccaggctatcgtggacccgcagtaactcgagggtgtgatccgcattatggcctaccgctacgccgagcgtctggagcagctgcgggtgtcgacggtggagctcaagatcattgcgcgcttcaacagcgaggccccgatcattcctgtgcatcttgtggctgagaaccccacggactacgtggtccgcgtgcaggcgtacgtcgaggccgctggccacgatgagcctatcttcacctccaccgcgcgacgagacccacggcgagcttgacggcatgccgatgacgacgccatacccggtggtgttcccgttcgacaagaagcgtcagatggccaaggccatgtcgaacacggtgtacttgtacgacttcttggagctaatcgagtacaacctgctgcgccagtggcgcaaatacgtgcagcagcgtacgcgcggtggcggtgccaaaatcaccatcccgaatctgctgatggagacgcgcgagctgatccgggataccacgggcaagtctctgacggagacgacgcgcccgcgtggccagaacgacatcggtatggtggcgtggctgttggcgctgtacacgccggagttcccggatggacgtgcgatcatcatcatcgccaacgacatcacgttcaaggccggttccttcggtacccgcgaggacacgctgttcgacctggcgtcgaagctggctcgctcgaagggcatcccgcgcttcttcttctcggccaacgctggtgcccgcatcggcatggccgagcccatcaaagccctgtacaaggtgtgctgggaggacgagaccaacccgaccaagggcttcgagtagacccccgaggactaaaacgttgcctcagccgagggctctgtgaacgccgccaccagcacgggcgaggagcgctacgggctgaacgacatcgtgggccgtgtgatcggcctcggtgtcgagtgcctgcgcggcagtggtaccattgctggtaagacttcgcgcataccaggacgtgttcacgctgacgtacgcctgcgaccgcagtgtcggcatcggtgcctacctggtgcgtctgggccaccgtacggtgcagaacgccacgcactcgccgatcatcctgaccggttaccaggagccgaggtgtacacctcgaacgaccagctgggtggcgtgaagatcatgcacacgaacggtgtaacgcacctgacggccacgaaccacctcttgggcatctactcgatcctcgagtggctggccttcgtgccgatggttcgccgcggccagcttccgatccgcgacctgacgggcgtggacgagatcgagcgcacggtggacttcggctgtaaggttctggttgtgcttgttgtgttgcgagtaaaatggaaactaaattgatgtctttgtctgtttgctgctatccatctacccgagggcgccctcatggcgctcggtcctaaacatgaagtggttggctgaggcgtgccggagcaggagcttgcgcaaccggtgagtatgcagacgacgacttgggctctctgcgtgcggactcaactgatggtgtggttgtgttctgctcttgcacgtgcagatcattacactccccccgacttgttgagggagcccgtgccacttgaccaagtactcaggttggcggctgaagatgcgcttcttgaccagagcttcgacaacgtgtagtggctcgccatcgtcgtcgaaaatcacgggagtcgacttcgggatcagacggccgacgaagcgatcagggttgctgttgtataccttgagcttgtcgatgttgaagcgtgggctgatgtgcttcaagttggccggtagagccagcagcgcgacgttgccgtgaagttccaggatcgggtacggaccgatgaagcgcgggatgaacttccgtgagcgaagcgtcgtttccgcggtggcgtgcgagatgttcaggtcctgcgtcgacagtaaggctagatcaccgaccttgaatgggtttgctgcacgacgccggtcgtagaacttcttttgatcctcttgcgcatcccacagatccttccgagcacgttcgatcacctcttgacgatgctgaacaaatcgagacgcgtactccacacgagacctcgccaccggctgatcgctctccacactacccaatgggttcttagggtgacgaccagagtcgacgaagaagggcgacagcttcgacgagctggacaccagtgttgcgtgcacatactcaatcatgggcaggtgctcattccagtcgttgccatggtacaaaacagagcatcgcaacgagtcctcgagagtccgattctgacgctcagtttggccatcggcctgcgctcggtgggcagtcgtcatcgctgtcttgatcttcatcagctgtaccagtgctttccagaacttcgacgtgaacttcgggttccggtcgaagatgatggtcgatgggataccatagtacaggatgacgttgttgaagaatagcttggcaatgtcttccgcagtcgccgtggtgtgcgtcgggatgtagactggacgctttgacaacttgtccaccacgaccatgatcgcatcaaagccgtcggacacaggcaaatgcgtgatgaagtcagtcgagacaacatcccaacacgcagcgggcaacggatcggctgaagctttcctgctcttcgtccggtgcttgacttgtacctcatgcatgactcacaactctgaacgtaggctttgatgtccagatccattctcggccagaagtaccactgtgccgcagcaagctgagtgcgacggatgcctgggtgcgccatgatcgccgcatcatgcgcgttgtgaatgacatcgagccgaagtttccggttgtttggcacacagagacggcgtaggctgtcgttgctcttcaaatagatcaacccgtgaatgacttcgtactcttccgacgagcgtctggacttccacagtggcttgaagactggatctctgccgtatgccttctgaaacgcccgcttcgtttggttatccagctgaagtgagctgatcaccgtgctgtcctccattgacgctgcgttcaacctcatgcaccactgtgctgtgccaactccgagtgcctttgtggctggcggtttgacggccagcatcacagcttgatcccgggacggtatgctttggagcttcgccgtagccatggtacgtcgtgagaccacgtctcgaatgttcgtgcatgtggtagacgtcaaacacgccgtacacactacaaccggctcgggcttggactcacaatcctcctgcccctcccccggactcgatgaagcatcaggggggcgtgacaacgcgtccgcaacgacattcaaagctcctggacgatgatgcagtgtgaactggaaggacgcaaagaagtcgacccagctggccaggcgacccgacaggcgtggatgctgcaaaaaccacttgcacgccgaattgtccgtgtacacttcaaacgagactccatggaggtaatgacgccaacgtgtaagcgcctgcttgatcgcaaagagctccttctcgtggacaggccagttcagctcgtgaggtcccagcttcttgctgaagaaagccacggggagatcgttgccatcatgcatctgagagagcactccaccaatgcacgcatggctggcatccgttgtcacgatgaatgttttttcaaagtccggcagacgaagcaccggagcgtgctggagcgcgagcttaatggcattgaaagcttggcgctggtgttcgttccatacccaagcgacatccttcttgaccagagagctcaggggcagtaccaacgtcgcaaactggtggatgaagcgacgatagtacccggcgaggcccaagaagcgttggaggtctatgatgttgcatggctcgttccactctgcgatggctcgagtcttgcgagcgtccacgtgcaacccatcagcagagatggtgtggccaaggaagtccaccgaggcttgtccgaagtcgcacttgtcaggacgggcgtaaagcttgttagcgcgcaggacttcgcagacttgtcgtaagtgctcaacgtggtcagccatcgatcgcgagaagatgcagatgtcgtcaagataaacgaccacgaacagtagatgactcagcagcttgcacatcaggcgtgtccaggtgcctggcatgccggccaggcccatgggcgccacgttccaatgatagatctcatggttcgtcctgaatgccgtgtactgttttgacgtcggagacatgcgcatttggtggtatccactcgcgaggtcgagaatagagaagcccattgcgcccaccatgcgatcgaagagttgttcgatgtgcggtagcgggatcttagccacatccgaggcggcattcaccaatcgatagtcgatgacccatcgaatcggcatgtgcgggttgttcgagcgcaaccactccaaagcgggataggaacttgcccgtcgcgggatcctttttcggcacgccgaagatgttcgatacccagggagagtccgacacttcgacccagttcttcttcagcagctctgccacaaagatgtccaatgcttcctgctcaatcttcgagaggcagaagggagctcggttgcttggcgtcacccctggtttcaagaccacttcgtgctcgatggagcggcttggtggtaatccaggtggcagctctgctggaaagacatctgcgaactcttcaagaaccgcttgaagctgcaatggcacggacttcaccttgggcgacgtcttcactgtgacatgatacagttcgacgtactcgtcagccttcaccttcgtctcgaactccgcagccgcaagaacacacagcggcgacgcgcctgtaccatcgccaccgtcgtcaaagatgcgtggtaaggtctggtgtcccagcgttgctagtgagctcggtcccaacggcatactgaagtagcctgcctgcacatggtcatcgagctgctgccgcaggttcgggggaagcgggtgctgaagaaattccggtttcacttccactgaagccaccgtcggtcccgccacctcaagactgctgttcacggaaccgaagtcatgtactacacgctggttggggaagcgcatcactccggtttgccaattgatgatcgggctgaactgcactaaccacgggtggccgagaatcacgtcttggtttgaagatacctcccattcaatgagagaaacatcgttgaagactcttccatcaaagcagacagtctccaaacattgctgtgcggtacgcgccggggttgtcgtgccatcaaagcgctgggccgtgaccttggtggcctcaacgtagtgctgcacgaggcccggacgcacaatgttgcgctctgcaccactgtcgatcaagactcgcactgcctggccgctcatcgctccctcgaacctcaacagttcacgattgggcgacaacttcgcgtcgagagacaccatgttcagctgcaaactgtcgatgacctcgacgtggtcgtcgcggttgtctgcgtaggcgtcgtcatcgtcgtcggatgcgtcgtcgtcttcaacaatgcggcgaaacgagccctggtttgcgcggaaagaaccgcgcccttgtggaggacgagatgagcctcgggggttgttacgcgctggccgcttaggacacgtagccaggcggtgtccgggctccttgcagtaaaagcaaagattacttcgcagacactcttcgcgagacacgaagcgcgaactcccgatctccattggggtcggctcctcgacatgatgtgacgactgctgaaggcgttgtggaccttggcctccgcggttcacgttggttcgacgcgatcctacagcgtgcgtgcggtcgtacatgagtgcaaacgaaattgcgtctgtcgtgttcctgaactggcgcagcttcacctcttgtttgatctctacgactaaccccttctggaaatgcatgaccttgtcgatgtcgctcatctcctctaccttgcagatgatgcgccggaaggccgacacgtaatcttcaagacaggtgaagttgttctggcgcaggcgtaggagctggtcacgcaggtgctcttgccgatcgggtgtcgtgaactcgctggtcagcagctcctcgaactgcgtgaccgagtgcaggaagttcccgttgtgggagacgtactcgcggtaccaagccgctgctggtcccttcaagtttgccaccaagagcgacaaggggcgctgctgcggcgagtcggcgccgtacttgatgttcttcgactcaaagtagagcttggcgctgaagaggtagtccgcgacgtcgtcgtccttggtgccggagaacttcggcatggtgatgccctcggcccggtactcgcgcgtgtctggcgacgaagagtcggccaccgacggttgctgctgctgcgaggtggattgctgctgctgttgctgttgcagtgtcaccgccatctggcgctccagctcggctgtctgtgccataaactgctgctgctcgcgcatcatcgccgcgagcgaggcgaacatctgctgcacgctgtccgcgtgctgcatcgctgcttcatccatgtttgcgcctacgctagacacgtcgttaatagatggctggggcgcgcaagctcctcagccaaatcaatcaaatttgaagtcgcaggcactcccagcagcgctgcttccgacaatgtctgtaagccccaacgaagtcacagaagctcgtcctggagctctgtttccgacaagtaccaaccacttgctccagcgtcccgaaggaagcaactggtgcaattccgtccggcgctagctcgagcccgcctcggagcacaaagactcctactactagactcgtaacggccaccgacgcggatgttacactcggctgcgcactgtttgcaagtgacagccgaggcgacaagcggaaggtcgaggtgggtgtcgcgtatgcacacgcgggagtgattgggctaaatgcaccaatgagatgtgacgtgtgacaatgcgcgtccccactcctcccccagaaagaaaaggagcgagccaggcgaaaatagaggtcccgtcggcgacgagcggaacgaagctgcggacgaggcaaagcacgcggcgcacccggagaagctgaacggcgagaggtacaggtgcggcgcaccgaagaacgtaggcgaggaagacggcgtgcgcaacggcaacgcgggatggagtaggctggacggcgtgcacactagcgacgcgcagcaggactggactggaactggaactcgaacggagactggaactggaactggacggaagcgcgcgctggaggcgcaagtgcaaccaagtgtaaggttctggttgtgcttgttgtgttgcgagtaaaatggaaactgaattgatgtctttgtctgtttgctgctatccatctacccgaggacgccctcatggcgctcggtcctaaacatgaagtggttggctgaggcgtgccggagcaggagcttgcgcaaccggtgagtatgcagacgacgacttgggctctctgcgtgcggactcaactgatggtgtgattgtgttctgctcttgcacgtgcagatcattacatcggccctgccgacaagagcacacagtacgacccgcgcgcgctgctggccggtaggccacgggcaagtgggtctcgggcctcatggacaaggattcgttccgtgagacgcttgacggctgggccaagagcgtgatcgtcggccgcggccgccttggtgacattccgtgccgtgtggtcgtcacggaggtgcgcacgtccgagaaggtcatccctgccgacccggcggcgcctgcctcgcaggagaacctgatgccgcagactggtcaggtgtggttccccgactcggcccacaagacggcgactgccgtcgaggacttcaagggtgaggacctgccactgttcatcctggccaactggcgtggtttctccggccgccagcgcgacatgatcgacgagctgcccaagctcggtgcagccatcgtggatggcctcgtcaactacgagtagcccatgttcgtgtacatcccgccgttcgccgaactgcgtggtggcgcgtgggccgtggtatatcccacaacgaaggtatcatggtgatgtacgccgaagggacgcggtggtctactcgagccagccggtctcattgcgaccgcaagaaacagccgtctcgacgacatgctcgagcagctgaccgcacgtgccgagctgtcgcccgagaagaaggagtccaaaagcgccaagatggcagctgatatcaagacctgcgaagaaacgctgctgccgatccacgtgcagatggccatggcgttcgacgacctgcacgactcgcctgaccgcatgaagtccatcgaccgcatccgccaggttgtgccctggccgaaatcaggcaagttcttctgttggcgtctcaagcgtcagctccccgagctcacgctgcaccgccacgcagccagcgctggcggctcgcgcccgacggtcttcttgtgctcgtgagtaggtgatccagggctgggctgtgaacggtggctgtgtgccgcgtcagcaggacggtgttcgagatctggtcgcatggcgactcagacgtgctggctgtcgagcgacacagagtggatcgcttcgtgcgtggccaagctccaccaggagcagatggcctcgcgctgcgaggcttgcaggtcgtggtgatcggtcgcaagaaccataggccactgtggccggcatcctggaggtgctcaacctgctgagcgacaagagactgtggtcgtgctgcgccggggatccatcttccacaagtaaggccgagccgttagggcagggattgttttgcaggtgtcgtgtatgagttagtaggcagtgaagacgtgaatgcatatgtatcgcttcatgaaaatatgtcttgaaatcattcgtgtctttgccataaagaacacgaaaatctaaaggatggagaagcaagacttcaaacgcagcgatacttgaacacacttttcttggaacattctagctgatggtgacgttgcctggccatctcctcatccgggcgggcattctagcctcttgtcatgcacaacccgaagatcgagtgcagcattgactatagagaagcgccaacaacaacactttcattgcagattcttccacatgtagagcttacccacaacactaccttagcccttagcgactccgaaaattccagcttgagtatcaacaagaccacctgcgttctacgcgcttaggaaacgcattccttctccatgttgtaggtcggctagccgggcacgtttcgcagagtgtggaagacactccgcttggtcagaatgtgccgcaggaccatatttctggcatctaactgcacccattcgcactcctcgtccagcgcaacgttcgttttgcgtacgctgcgtttcattaccgtcctcgcgaacccgttttacaccgagtccactacgatgcgcttgatcagcatttgccacatgaccttcttcgttacgaggatcgcgtgcttggtcgtggccaactgcccgcgcttgctctcgttgtccgctgcgacgctcctgttgcatatgctgcggctcaccaccgtcgcgccttgcagcgactcgtccacgatccgcttggtcaggactttccacatgaccttctgggtggccaagttcatgcccaacaatactatgcaggctgcttgacgttgtgtcgctcttcggttgtgcgcttcgtcttgaagtgttttgcgatcccgcgggtgtagcaaggccgcgtcaataaatgaggggcgccagtgaacgcctgccagaatccgtccattcggaccgtatttccagcagcacacgcgctcatacgcgaacattccttcatcaacccgatcaccccacccaaagcatcagtctcgtcaccgcaatcaggactgcagaacggagtgtaaacagcatttctgccggcgctctccgcattcacatcttctgcttgtgtctctgctgttgtatgctgtagtaactgggtgcaatcttggcgtgaagctggaccggcttgcgagagctcacgaaacgcgttctctaaggactcctcagactcgctcggcgcgctcccatcgccgccatcagacccgaacggtgtttcttcgctgaccgcgcctgcattcacatcttctgcttgggtctctgctgctgcaacctgcggtagctgagcccgctcttggagtgcagctgggccgacttgctcgggcttacgaaaagcgtcttgaaccatttcctttgagcatactaaagcacgttggggggtcagcagtcgttcaggattattgaaggcgagccccatcaagctcacggagcgagtgcgagttggggctgcccccgaataattcgccgaggtgatcgggaacgagctgctggcccaactgtccgagcacacgcataacgttagtagcatgagatagcagtgagaactagagagagcatgtagtgcatggataacgtgcccgttgcggatacagctacccacccatgctcgaactgatgatcttgcgctacttggccccgagcgtggacgagcagccggtgttggttgttgctgagcatggtaggaagctaggtccttgcgggcgtaaccgtggagcaactcagcagcgtgggcgtgttgttgtctgatggtgggttgctgggaacgacggtgccgccgagcagcagactgatagccgagaaggttgggtcaatgcgttgcagtacgtaccgcgggtggagacgcgagctgcccccagtataggaggtaggaatagtgagcgggggccgcctgctgtgccgaagagtcgggtgcgtgccgccgggcgtgcggtcgagcgtgccgtggtggtgtgtcggggctgcaggggccttgcgcccgacggtgcaaactcttgactggcccagaacgaactgctcaatgccacgttcggctggggacaaaacacgtaccggttgcccggtccaagaaaaccgcccgcttgaatggcatactaaacctactggtgaccgcgcgcggcttggtgtgcgtgtgcatcttggtgtcaacgcgcgccttggcgtccgcgtgcggctcgccgtccacggtcacttcgtccttcttcaacgtggctttatccttccatcggaaaacctaatttccccgctacactcggaaatacaccccttcttgttgatatatccttcatgactactcaagaactcacggatacgatgggcacctcgtgtttgtccactccctgcttcagaaacatggttcgcagcgctgctacgcctccgccattgattttggtccggcgtttttttaggtgctggcacagctcgttgaaccgagccttgttgtaggatccggccaacatgttgaaatgaagaatgaaagcaacaaaagaacgagagtgtgaagaattagagaaatccgagaaagggaggagaacgtatttatcgtttttggcctcccatatattccagacttcaactgcgacgccccacccactcctgcctgcctggttccggctgtagcgccatctcctcctgcctggcttcggctgtggcgacccacacctgcctggctacggctgtggcgacccactcctgcctggcttcggctgtggcgacgaatcttctgtctggcttcgcttggtcttggtcagcgccatcaactgttgttggcaagctcgaagatgttggaagctggtcgaaccccaagttgagaagtactggggtcatgatcgcacaatgattatgcacgagagagcgacttcgtctgttgcaagcgttcggggtggtagcgtagtgcggtaacgagcccaagtatgtaaggcccgcgtgcacctcacaacgttgacatatgtggtgatagagagaggtttgacaggaaatgagggagcagaggatgaagaggcgagtggacgatccacgttttcgcgtacgattcaagggctgaccgagggaacgtgaggccctccaaactgccaaacggaaaatcaccaggaagtgctttggcaacggacaacccaattaaataagcagagcatcttgttctgaactgctgtgcgattccaattatagattcattattatccttagcgcaggtaacagatccactcggtaatgatgccggcaagaagcaccctaagaaaagattaggaacagcccgccgtcgtaggcgagatagcggtatgcagtgccggtcatcagcgggcggctgtgctgcactacatgttccgctcatgacgaccgtcgcagcggcggttacacggacacggtaccgacaactccgaggcctcattagccacatcggctcgctgcgccgccgaagattggagtggtttagagtgtgattcgtgtcgggagtttcgagttccgtgcgtccgagcaagttgaggaatgagggcagcgcgatttatccaggtgcttcaacggtgtcattctgctgaaccacttaccgacatacaaaacaaaagtacttgtatagctgtcacccctccttcagtgaaaaaggtaacaacggaccgtctataacattgatagagcctaaacattacccactttttgggcaggcggggcgacacccttacaagaattgctttgtgtctgggattgtatgccagagaagcgaagaatacatccgtcctacttcaatactgaagtcagtatatgtatggttgtcacaccgccccgtattcaagctactctatgacgtcacgccatgacgtagtttttacatgggtaattacgctttcatgtcgcccctcctttagccatacaaaaactaaaacaggtagaactgtcactcctcctttaaaaatctagcccaagcgaaatcaggtcactattcaaatcgtcgagcgagaagcaggtatggtgtcgcgcgcactgaagttcattttccttttccctccgtcgctaacccctatggcgtttttgcgtacaatagacgaagagctggccagaaggagggcggccaacaacaccagcgaccgcgaccctgctcgcgacataagggccagcagcacggctgttggggacccacgtgatgcagcggaagcaccgcctgaggcaacatcaagccgccgtcaggccgaccctgcacagcgcaatacatttgcagcttgccgatcccattatccagaagagaagctctggaccctttgagatcgaaggggactaacctcgaggccacttgagggtaataatagaagttcaagagtacgagcttgtgcatcaggacctctactgtggagaatgccagcaatcgcgcttttctaccgtcgtcactaccatgaccgttcaatgtgaaggagcctttgggtaccagcatttgtacttgtgttcacgatggctaaaagctgtcataaatcgattcatgtgcctctgaacaacaccagtcattagtacagagtatgcgctgtctctcacgtctattttcccctcttggtatgatggaagagcagcatacgcaagtgaattttgtatagattcattcatctgtattgatttagatagcactagtttcgggtgcctttcttgcttgacctgcttgtattttcgaaatagcaacctgtattctttcttgaatcttggagactcttcgacttccgtcgtcatccgtggataattgccgtagcaaaatggacactccctcttgggcaagggacaaccgagattccgctcggcgcaaagctcatgcagtctccacttcacaccgatcaggttcttctgccggaactcactgtagcggatgttgaaaacagcgaaccagtcgtcctcgccgttcgctccatttcggccgatgatagacgtcacgaagccatcctcgctctgtcgctcgcgtcttgaaggtgaacgatgggaaactcgtagagaggatgccttatgcggttcggtctgtatccggctgcatcaggcatgtactccacgagtcgccacactggaatggtatggtgacgttggtcgagaagcgggtccgatggggttgttgtcgaacgtgggccttggcgaacgggttcgacttcgagctgtgggtaggtcgacgttggggagtcgggagtcctggggcttggcactacggactctactccttcggaaagaggtcaagtatcctctcggttttgttgctcggggggcgagtcagccgccaggtagtgtgaagcacagttcagaagagtagctgtgggtatatgacttgcgacggacccaatgagcacggaggaagccatgccgacccttgtgtgggaaatgatgctggctccttgcagccgaacaggcttgtgagtgtaaaggtaacgcagcagtcgttattgatgcggagcacgaagtggttgagatagggttcgcacaaattaaaaagatcttgtgaaatcacctgctcctctgccacctccaacttcatagaatcgagacaactggccatgataaaggcgatccagtgatcactattgacgccattatggtcttgttcattgttctcacctcccaagtgcgcaggcactgcaacgaagtgaagggttggcggctgtcaacacccgccgacatctgagtccatcccaaccggacggcagcacagcaatcgccatctttagcgcgttggcatcgtacaatatcgatgaacgccggcctgcaactaatgaaggaaatagcgcttctccgtggacggtataaacgctggctcaacgcgttcgccctacattagtggaacccacaactatatttcagtacttgcgtgaaattagcgcaatcggcctggggtgaatgttacgtcagcatatactatcgttgaacagacaatttgctgaatgttgtagatactgaaattggaatgctgaccggacgatgcatcgtttacgacaggaatgactcaaatgagctgggcagtcgatgcctcgggtaagttggaggttgtcattttcgcagtagcctcttggcggagctttgcgcggacagatccacgattgatattgcccttgggggagaacagtttcttctcactgtaataacgatgaaatttttcccagcatgcccatgtcggttgagggcatgtccatggggtggcagcttcgctggcagccaacagtcggccacctggggtcaccgatgcagtaggaggaggggtccaggtagccttgatatctgccagctcggctcgtagatcatccggatctccgagggcgatctccaactgactggggatgacgttagagggcgatgctgcagcggacggagtgacttcatcggcatcagctgagcgagcgacgacccgtgcgagatctgcgcgtacttgttgttcagcagcttcggcttgctgacggtgttctacttcggtgttctgggcctgctagagatctcggagacgaccatcggcttcgttgcgcacgcgttgaacctccagatcgcgatcatggatggctcgatgaagacttgcagtgtggcgaccagatgcttcaagaagatcctgggcgacgtcaagacggccccggagatccagcacctcgtgatcgagggccgcggtgacttgagcagcctggataatgcgcgcgcgttccgatagagatggctgcgaaccggaggatggagccgcggccggtatagatcgaccaagggagtgacaggcggtgcaatctccgtggctgtaggttgacgacggggcagcactcagcagagggacgccggcggccgacgacgaaggcgacgacgtgggtggagaagcagacatggtgcaggagctctacgcgtggcagccacctgctcgatagcctcacgcgaagagagggcgggtatcgtaatgcgggttgaaggattgtgaggcgatggacccggagggtacccgaaggtgacccggagggtacccgaaggtgacccgagagtgagccacttgaattatgggacacctagctcagcgtcccgtatagaaggccggcgactgattacgaaacccaggctgttcagttcagaatttccaacaacgagacaaggtacttcttcatattagtctttgtgttgtgcggttagcgcctacgtgtgtactgtgactgtttcctacctacttgcgaagtgtactcggggttctggattgatttggcctccccggtaaccttctagtagcgtagtgtgttgcattgtctggactcaggagatcagctctcagtgttcgacagtaggacactctaaacggtttagtaaggtattggtgtgcgtctcgcactttggtttggacccgcagactagctgcggcaggagatctccagtagatctcgtaaatattgtacaacaagttgtcgtacagtgggaagagttacctcgctgtacaagtgcatccgcgacagagttaacctaagtctctgcctgcgagtgtaaggaaccccatattcaccccttcatattacacgtcttctaggaattacgctagataaagatccgagtcttgctacacaaggtgaggcctagagatctcgggactagttctcgttgtctttgggtatttggcttgcaggggtacccccccccccccgtagttgcgtggcaggacacgtgtgggagtttattaggttttatctgagggactccaccacagaggaaagcgcgaccgcgaagtatgatctccaggacgggttgattatcctgcgcaagggtaagagagtcgtgctccctcaagatgaccggttgatgctggacgtgttggtgcactaccacgacaatgccgtcgtggctcacactggggctgtgcggacgtttctggctttgcgccagcattttctgtggcgtggcatgcgctcgacagtcgatgaatacatccgtacgtgcgagacttgtgctcgcaacaaatctggtgatcggcgcagaggtctgctgcaacctcttccaattccgacggcaagctggacggatatttcgatggacattgtgactggtttgcctctctcgaaaggatttgatgcgatttacgttgtggtctgccgtctaagtaagcgttcgcgctacttgcctacccgaaaggatgctacagcgaacgacgtcgcccaactcttcttctacaacatcgtggtgatccacggtacaccgcgctcgatcgtctcggacagagatccaaagttcctgagtgatctgtggactttcatggccaagatcatgcagattgagctgcgcatgaccgtgtcacaccgtgcccaagcggacggccagagtgagaggcagatcagaacgctggaagacgcgctgcgatgctccgtctctcactatggtgacgactgggccgactggctcccgtgcatcgagtttgcgcacgccactggcatcaacacctcgacaggacgcagcctcatggaagtcgacacgggacgacgaccaattcctgcactttgggttgctgaagatcaagcttcgttcgtgagtaccagggcggaggcaattgagtcccctcggcgccatctggctcaagcgcaagaacgccagcgacggtactatgacaggggtcggcgcaatgtgcacttcaacgtgggcgacttcgtgtacgtcaaggctcagctcctgaacaccaatcggatggcccggccagactacgatcctgagcgagatccgacagtgaacaaactgctgcctaagtggctggggccatttccgatcgagaaagtgctggggccgtcaacataccggctcgtgttgcccgaagtcttgcgttcgcaccggtcgttcaacgttgaccagatcaagctttccgttgggtgccctccgcagttcatcgggcgcccaattcgacgtgcagcgcctgttctattcgacgacactggaaatcggatttacgtcgtcgcagcattgttacggaaacgccggcgtcctggacgggtgcagtacctcgtgcagtgggcagacctgccgacaagcgagaactcatgggagttcgtcaccgaaattaatcacgtgtcccgctggcgagagctcctcgctgcattccgccgacgaacagcgaattgagtcgcgggggatgtactggtctaagtctacgtggacaagcgcccgtctcgacatcgatctcgtcagcggttcccgtgtcgacgcagtaccaatcgaagctcgcctccagatgagtcactctgctccagagacgtggaccagtctccgttcaactccgctccaagtcactacttcgtgctcggcgaatctctgcttgtaccaggcttcaacctggctttcgtgttgcattagcagcatctccccctggagacgcccctcagagctagctaccggtacttgttgctactcgctaacctcaattcaatgacattctgtcttttgctcagtcaagtacaagtggttcactccatccgccaagaacccgcctacccatgacggtggcgctcaaggactacacgctcttcaagcccaccagctcagcaaaaaaactagctcaagaaccgcctcgtcatgtccccgctcacgcgtgcccgatgcgaccccgtgacccacgaggcaggacccatgcaagtcgagtactactcgcagcgtgccggcgccggactcatcgtcacggaagccctcgccgtctccgtccaaagcttcggatggtacggcgcgccctgcatgtacacggttcggcacgcgcatgcccggtcctcgcggctacatcgacttctccgtgagcaactcggactcgaagtgatggaatcgtgatgacgaggagatgaagttgtgatggacgagagcagaggctgatcgggtttctatctctcgggtgtattatacttagcaagccgtgtaacgagaaagtcaatcggacgcctcgcagccttgcaataggcaagctcgacgcaagaagtgtggtatccacgcctaaggttgctggcatcgcttgtattcacctagaatgagaccaaccactcttgatgttcaatgtccattaaggataatggacatgacaccagcggcttgtccagcgctcgaggctgagcttcaaacaccccacgcgccagaagcttatcaaccgagggcacaagctgcacacaacgcgacatcgatgcaaatcgcgatcgtctctcggtccgtcccgctgctgactttagtgggacgatcacggccgagtgcctgtcaaggatcaaggcacccgcacactcttatgaggcgcaaagcgtgcggcgctcccttcgccattattcaatcctcctcctcggatgctcatccttccgctcagcaatgaaccaagtcctcgcgctcgccttgactctcgtcctcacgtgcctgctcgcagcccagcaggccgccgccgtcggcgtctgcaagcagtcggagctgggctcgctgctcacgaaccccaacacgacggcgtgcgccagcgactcaggcgtcgtgttcgccgacctggacggcacgccgtcggacgcgcagttgacgagtttttgtgagaccgacacgtgtctgtcgctcatggccgcgatcctcgccatcgacccggaggactgcacgctgccgctgaacgagaacctcaacctcatgagcaacctcgtggaccccgtagtggacaagtgcacggccatgggcatcgacatcgccggcagctcccgtgtcggcagcgacgacgccgtcaccgtcggcgacgaggacagcgccacgtccgactcgagcgccagcggctcctccaacgctgctgctagcactgtacaagcgtctgccgtctcggtcgtcgccattgccatctctgtgggcctccttctcgtgcactaagcagatgaaagtgtccaattgcgttagtcattaactacatgtaggccagttctcaatctaacttcaaatgaccatgccatcacatttactccgtctacatgctttcaagctcggggccaaagtgcttgacaatgagcgggcgcttgagcttgaacgtcggcgtggcgaagtcgttctcgggcgtgaactgctccgagtggacgtggaacttcttgacgcgctcgaagccgaagagtttgtactctgttgccagcctctccatctcgcgggcgatgtcggccttcaactcggcgccagcgggtgaatccgcagtgcagagctcctcgaacgaggccttgaggcccttgtctttcgcccacttagcgacgacctcggagtcggggacgataattgccacgaggtagttcttgagcgaatcgccgtggacgaacgcctgagcgatcagcggactcttgatgtagatgccctcgatcttctcgggcgcgacgtactcgccctgggacagtttgaagatgttcttcttgcggtcgataatgcgcagcgtgccgtccgcgttccagcagccgatatcgcccgtgtgcagccaggcgtcggcgtcgatcacctccttcgtcagctctggctgcttgtagtatccgacgaagaggttgtcgcccttcatgaggatctcgcctcgaggacagggtttgtcgtggctcgtgtagttcatctcgggcacgtcctccaggcaaatctgcacgttacccagagggattccgatgtggtcaccaggcggaatctcgtccgtcgagcaggagatcacagctccagtctctgtcaggccatagccttcgagcatcgtcgcaccgaacacaatctggcagaactcctttacatccttagacagcggcgcagacccgttcatcatccgcctcacacgcccgcctaaagcttgctgagccttgctgaagaccaggaagtcccagaacgcgtgcgtcttgtagccgtccttgagatagtacttcttggaagcgtacgccgtgtcaaatagccactcccgccgctgcagcaccttgagtaatcttgtcatggatccgattcaataagcgcggcatcgaagggaacaccgtcggctgcagctctcccaagtcgtccattagcagcttgacgtctcccgagtagtaccccaccgccgctccattgtagatgaacgtcgtctggatcacgcgctcgaagcaatgcgctaatggcagacacgacaagtgaatgtccgtcggcaagaccagcgtgaagtccagagcacaagctgctagcatgtgtgagtatggcacccttcggatcgcccgtcgtgcccgaagtgtagcagatcgtggccaggtcactgggaagtggcggatctgccggcacgacgttcttcttgccgtcttcgatcagctggtcgagcgtcatgagcttcaccttgtgctcctgagctagcgctttctcctcttcatcaatgtcgtcttcgaactgcaccaccgtcttgacgcttggacactcgtgcacgacgcccatgaggaccttgaactgctccttcccgcagaagacgacgctcatctcggtgtggttcaggatgaacgggatcgcagtggggcccagcgtgtcgtagagcggcccagcgtgtacgccatgcggctggcgctgtgctcgacgatggaccactggtagcagttcttggcgaagacgccgacgatggcgccgcgctgcagcttgaggatgtggctcatgcccgacgcggcggcctccacgaccggcaggaagtcgttgagcgtcacccactcgtaggccccccgtttgcccgcgccagggtcggccttccgccagccgaagagcttgttggtgccgctcgggtcgaacttgcggcgcagctcgcgcaggttcttgaacagcgtcatgtccggcgtgaagccgctcttgaggtggcccatgcgcacggcgccgtgcgtggccgtggcggtgccttccagctcgtacgaaaactgcttcatcggcgcagttggtggggccatacaacggagggggtgctacgggtcgtatcctgttgctggacagacggcggattgaggaatgaagggacagcggatcttagacacgcaggcaactgatggccgcttcgtggccgtggctatctgacaccatggaagcgagctgctgccatcgattcgaggtgctggattctggatttcctggtcacaacaactgaagaggaataatatcctagaccgaagccggacgtctgcatcgtctatttaacgcaaaatgggcactttcagctgttcggcaggcaggacatgactccaggacgcacaaaaatgttaatgcagaacgccattccgttgccaagcgggcgaacaggggacgccaagttgagaagcgtcaaggccaggagctgtgcactttaaaggaaggagagactggcgatagagttgtgcttcttggctaccgcccaagaacgacttttgcgttgcatattcacaatgccagatcgttcgacaagaatgctgccttcggactgtggcattgtgctgtacgatcgccacgtttgacttgctcgaagatttcaatacactgcctattctgaagtcggtcgtttctctcccaggtgataatggacgcgaagtgaagtttcgcccatcctgccaaccgctcgccagctgtgccgtgcgtgagctcttcacttacaatttctctctctctctctctctctctctcatgacgccgctcaagaaggaaacgcgggcgcgaagtccctccgcatgggaggccgcgaccggcataacaggcgtgggggagcactacatggacatggactcgcccacgacgccaacgactcgatccatgcaactgcgccttcggaaacacccgtccactgcctcatcgtccatggcaaacgaggagactcaaggtcttaagaccatagtcaagaaacccagtcgacgacccgaagagagaggtaacgtttcctatttactaagaaatttacaagctcattatctgaaatacttaatttatgaacagtattccgccggcacattgggtgtgcagctcgcgctgcggctggggtgttgctcgcgggtgtgattcagacgggatcttcggcctcatcgaatggctccaagctcctgccttccttctactatttgggtgggctggcttacgctgccatcatggtaatttacgcctcagcgcctacggttggcggggttgtacagcaaatctggcagatcgacttgggcgtgggcctcgcactgctgtacaatttcgcagtgttcttgtggatccccatcacgcagggaaacctcgtttcagtgccggagaacctcaacgacacgctgtatttcgtcagtttgcacgactggggactcgtcttgcccttcatgctcgtgttcacgttcgtggtcttcttactgcccatcgtaagtgaagcttgactgtgtttgacattcatcaagaactgtactaactacaaggctctggctgtgttgcagcaacacaacgtcaaaaagtttgcggtgatgtctaatgctttcttcagtacgttatttactaaaaaaacacttgcttagcttggtagctaacaaaactttgtctgaatttagtgttaaagttcatcgatcccatgaatccgagggttgatggcaccggtttgaaggatctcaacaacagtgactacgccacgttggggctcatgaagaatctggctgtgtacagcatcgtaggcgtggtcggcacgctcatctcgctcatgacggtactattgcccactccgctcttgtaagtctcgcaattaggaacgaaagttcgtgcctcgcactaacgttcaaatgttttatgctagtgccaccaagaaggtgatgcggcacatggctcacgcaccgaatgacatccgcaagatcctgaacttgatcatggactcgtattgcttccgcgtgaaggacataaagaagatggatttctttcggctgcggcttgaccgactattaggagcggcgcaacacagattgtccgagatggaggaacttctggacgactgctggtgggaggagatcgtgggcgtgggcttgtgtctcacattcaacaagaacatcgccaagcaattcgtgaagctttacgcgcggcttctgaaggatctacgagctatgaaattctccatcgaagctgagaacggccattggactcacgtggttctgatgaagaggatgcagcaaagtctccatctaatgcaggcagaagcgaatgatttattgcgggaggtcgcaaacagagtgctggaagcctcgacggatatgccggcgcccaggtttgtccacttggaacaaaccgtggaccatttcatgaataagtacacgaaattatacggcgcaatgctctcagcggaggttcatacgcctggtgacgtggggaagaccatgtcgctgaacgtgttcatctactcgttccactcgttcgtccacacattgtgcgagtttgaagagcgcttcaaccacaagaatttcacttgccgatatcgcatttggaagttctttcacgtgatgtggtgcagtgtctaccaaggaacgatgtacatgagaaaaatgacgatattcgccgtccgtacgacactagccgtgctgatcgcgtactgcgcctccacgttcatcttcgccttcagtgcgactgggcccaccgccatcgctatggtggcgcagttccacgtcggaggcacctatgggaacatgaagaatcgcatggctgggctcgtagcaggcactgtcgttccgtccattcttcacttcttcatctgcaagatctcagacgtcgtgttctacaatgcggtcaacaacgccgtgctgttcgtgtggatcgtggggtccatgtacgtgtgctatagctcttcgtacttgcgtatggcgggaatggtatccgcgtacatggctgcttcggtattgctggatcacagctgtcgaacaaccaccaaagctctttcgtactcaagcctgactgaaaactccatggccatcatcatcttgatgcttgtcgaagccagtcttcaaccaaagagtgctcgcggtctgcttcgctccaacatccagcagcttcttggagcatacagcaaagtctttggtcgagtatttgcgcatcacatcacgagcacgcgcgcgactgcacccagcgtcagagatctaccaacagtgaacgagacagcttcggtcaatccatcgacagccaagttggacgaagagggaacgcgatctctacacaaggagatttccgtcacgttgccagcgatcttgaaacaacagaagaagctcgtgcacgatgccacggccgagcccagcttgtggaaatccaagttctccaatgagcagtacacgcaggtactagctgtgtgctggactttgctcgacagacttcgactgctttccgacctcgtggaatggcaagaaaggtcgagtaaagactgcgatcacggaggctaccgccttaagcgcaggaatgctggcagtctcaacgacgagtgtaccgctgccttcaaggagcaagaagaagagcgcgctaaccaaccagaaaccgtctactatacggcgagagctccggcaacagacgatattattccagaagcaccattgccaccgctgccttcaaacgcaacgccagcagcagctaaagctcggtgggatcgcagtcaaaatgcctacgagtctgtggtcgtggagtctttcgagtccctcgcgacgctcttcagccaggatttcacgtacaaaacagccgacgactacgccatttacttgcagatgaaggaagcgttccgaatcgcagataaagaccgcagcgggactgtggacacgtcagaattggacgtgttgcttgaaaaattgatgccgtacaccggagaccaggggaatgtccacatggatcaatacgtggatgagttcatgaggctcgtcgacaagaaccacgacgggcagatcacgttcgctgagttcatgcaggccctcaacgacggctttcggcttgagcttgagatctatgagaacacggcgcagatgatcccgagcaacacggttcaccagctaggcgatgcgactgccgcaattcggagacacgaagctgcttgttcaatggccgtatcggacgacagctccgctgttgacatgctggaatcgagtgcagctactagcgacgccgtgttgacgctacctgcttcgagctcaagggtgcctccccctagatcgaccgtgttcttcactccgccgtcttcttcatcgggcattgggtcgtacgtgcttggcagtagtggcgatgaacgagaaatagctccaccaagtatcactaagagtagtcggcggcgctggtgggctcagcatcgtaccgatagtgctggtgtcgcgctactcaacgtcgagtccttctccttgaacgaggctgccgcgacgttgaagcagagctatggggagctcttgctccgctcgctggacgatgaagaccagtacgtaacgatggaagatttcatcgtcatgagctgcctcatcagcgcgtgtgaagacattgccgccaacttgactcgactcaacacactcgctgcatcgtagacggtaaatgctacgaaacagcaaaagaaatccaaataagcgatatattctactgcagagcgccttccgcccctgccatcgtgtctcgtcctgcgctgcgttgtcctagcttgactgcctcgtcaccttaggcgcgggcctcctcttcctccttctcctcgccgtacttgccgcgcttggccatgaagtcgtggaacgccatggagctcagcagcagcacaacaacggacgcctggccgtagatacgcgtgtgcatgatctgctgcgacgacgagatgcccttgttcaggtgctggtacgcgtagatgctgccgaccaccggcacacccaccgtcgccaacgcgcggtacgggtggtcgtacaggaagttggctgcgcgctgccacgccttgagcttggacgcctcctgcttctgctccacgtacgtgccgtccatggtcgccatgtacatgtcggggttgtgcgcgccgcggaccaggcggttctcggcctccaccgtgaaggaggccaggaaggacatggccacgagcgccgtcttggcactggcgttcagacggttgcggaaggtcggccagtgcttgttggccgtgagcacgccggcgcccacgacggaggcgacgacggcgccggtcttcatgccgctcgtgtaggcgtgccacgagatggcgtcacggcgctcgttcgggttgctggcctcccaggacgcgttgtgttcgatggagctcatggtgtgtgtgtggggggggggcgacttggtgtggacgtgttcaattggggaatggctgccgacttgcggcgcagctttcgtttcgatggtgctgggtcggacagctcatgcagtggaggtgatgcgagacggggcatacataaacattcggctagggtgaacactcattttgattatctggaatgcaaatttagtctaccaggaagcaaaagtacgtcagaagtggacatagatgggcgtccctagagcaatcacgccgatcacgctttgcatggttgtcatgagcttgaaggactgaagcgtgtgcaggcgctgtagtttgtactctttcatccactattcaaatacatcaagggcctagcccccactactgcgacttcttcttccacgctagggctgatgcgtctccgagcgcgcgagggttgtgcagtttgcggcccatgaagaacactccagccgcgaagaagatgccgccgacgcccaggaagaacgcaccaaggacgtaattggcgctgccgaaccagcccacctcttccagcaccagcgccttggtgccgctgaaggagcgcacgaagaagttagactgcacggcgaacgtgagcgtcgtgttggcgggcagatcgcgctcgatgcggccgtacggcttgcggaacgggtgcatggcggcgccttcgacccacacgcgccagaactcgttctcgacccccgtgcccacgccatagtccggatccagcgcgtcatgcacccacgcggtgctgttcgtgtagtccgcagtgatgtacgggtccgtcgggccgttgggcggcgggatgatgcgactcatgttcgggttgtgccacacgggcaggtacgcgctggaggagacgtcccatgtcgggttcttgttgttgtgcgccgcgtagatgcgtccgatgcccttggacgtcaagtcagtccgcgagagcttctcacccgacggcagagccccctcatgcagccagaagatgtcgttgaacaaggtattggccacgatgccgcacggaaagagctcgcgctgcttggcggccgatcttgactcgcacgcgccgacagtgcacaactcggagaccgtcgacttcatggggtaacactcgagcatggacgtgccggcgtcggggcggtactcgtccgtgaactgtgtgcggatgatggacgaaacgaagcgccggtggttctggtagtacccgtccagctcgtagaacacgcgcacgggactcttgacgtctttcggcagcttgaggttcacgaagcacgtgtggtcggcgtggaacgaattggcgtcgtcggccgagtccagtcggcaattggagagctgcgtgacgttgccgtcggcctggacggcgttggccgcctcggttcctgggttgccgtcgtagaccacgcgcaacgtcgtgagtgtgctggaggtgtaggcgatcacgacaccgagtgcgatgcacatggtcgctatcgtgtagcagatgccaatggaccatccgagcgtgagcacgggctcccacatgtgcagttgctgctgagtcatgcgagatccatcggggcggttggtgttcgcgttgctgttgagtgcggacttggtgggggcgttcttcttgctgccactgctgctgcgtcgacgtcttgccttgggcgacgaacggcgagacgctacgcggggcatctccacgccttgaggcagcggcatgacgagcgactgcacgtccacatcgctcggtcgaacgagaggcttggccgtcatcttgcagcggtgctaagtgcgctgcgttctcccaactgagggcacttcgagcgaggtacgttgcagcaatggagaaaccaacaaccgtgatgttggttgtcacgagaagcctgaaacccctcccaattatacacacgggctcggatggatactaataaaaatgtgttgctgtatttctgtcaggtcgccagcggctacgcttcctgcaacttggagccttggacttcaagacaggtggggaggagagtgcaatgctagcctttgccgtcggggccgccttactcctcgttgtcctcgaccgtgaacttgccgcgcttggccatgtagtcgtggaacgccatggagctcagcagcagcacgaccacggacgcctggccgtagatacgcgtgtgcatgatctgctgcgaggccgagatgcccttgttcatgtgctggtacgcgtagatgccgcccacgatgggggcgccgaccgtcacgagcgcgcggtacgggtggtcgtacaggaagttggcgctcttctgccagaacttgagcttggacgcctcctgcttcggctccacgtacgtgccgtccatgctggccatgtacatctccgggttgcgcgcgccgtgcatgaggcgcgtctcggcctcgagcgtgaaggcgcccaggccgggcgagatgaccagcgccgtcttgccgctcgtgttgaggcggttgcggaaggccggccagcgcgcgttggccgtgaacacggcggcgcccgcgatggccgtggccacggcgcccatcttcatgccgctcgtgtaggcgtgccacgagatggcgtcgcgcgccttgttgggattctccgtcttccaggacgagtgctcggggctggcgtcgatggcgctcatggtgatgttgatgggggtatggagtctaaggggggtggatggatgtacacacacgcacacgtgcaggcttgagctcttgacggagacttggattatgggcctcgttgtgcgtgtggcccaggacctctctgagcttcagcttcggcgctgaagacgacggggacgacagctcaccctgtgcttggacgcgtccaccgagcgcgctgattggccacgtcgcactgcgtttctcttgcgacggggtctctttaacgggaaatgggtctagagacccaaattgggctccgagcacggcaaaggcacgacgtgcatgtcagcgtggccccgggcatccttctctcagctgcagcacggaggtttcttcacggaggtcgcactctggctccgcggaattttaattctggcggtagtagtgtcgtagtttttttctagttaaactacggcattatgatagtaccaggccctgggcgagcaaaatggcagtgaaacaggttgccgaggggttctcgagatgagctcgcctacgcatttcactcaacagctctctactagtgatttttaaaaagatgagggaactacgtgcccatgaaggtaaagaagtgtcgtatcctgtggattgtcaaggttggcatgaaggaaagatacaatacattgagcgcaacatttagtgcatgcattattttattgaaggacacgtgctgctggaagccgcactagagtcttaatgagcccctccaatacttcagcatgccgcaacaaatatttaatgaaatctagctgaagaacgctcgattaagctctctcaatccagcagagacagccactgcatggagctcaagaaaatgtgacgcaatagttttcgacgttacgatatttggagattttttattgtggttttgtggtttaaaaacatccagtgtacgtattgctagctatttttttgttattgtggctttcatccgttttggcaaatcgggtggtccaagatccgatatatcgggcccgatttgctggagggctccgatttagcaggaggggctgactatatctggcccgatttgcgtctgggggctgcgagttgcgaagcaggggccagaaatgccgcttttcgccggcaaaagggaccgccgcgaaaacatgtctggggccctctcagatcgaggttgtagcggccgtagatgatcacacaggtgatttagctggccatagtgctatgaagtggctatatacagtgtactattgtccccaatgttttgcagttctaatgcgtcatgagaggtgaggaggtatggccaacttggaatgcctcccctctgagccttatgctactaactcaggtcagatatagctaaattggactaaccgatcatgtagaagctccattttataaaaatcggactccgagataacacgtcaaatcgggcggcaaaatatttaacaacattgaacgaattccgtcggtacagttattgagaataagagcccatttggcggtatctcccccatttggcggtaccgccaccgcataaacgtgatgatgccaaactcacataatgcattctttcactcttttttcgcataaatttgcccttttggacgcgcatttaacacaaattggacaaaaatctggtgatccgcaagaattggtctctgtgacagggcgaaaggcaacttcgccctcgcgttcgcgtggtgggtaagattttccgagcttgcaacggcggaatgcgccgctgactatgtgctctatgtgctcggcgagagctgtgtacatgcactgtactcggttcactcctttcggtaccgcagcacatcgaccaaagacagcttgtcctgatgctgttgatgctaatatcatggcccacgcgatgactcatgacaacttcaatttatctgatggcccccagtcgctggtgcaatgtcgtcgttccgcccgccggcaccacccgagctcgtgcatgtatccaccgcggcgcgggctggtggagccaattgtgtacgaatcccgcttcaccgagatgtttcatcaagcaatcttggcgggtgcacggaagacagggcgcctgactgcgtcgatgacggggcaaccaaaccttggatgccaccgctttagagtggtgtcaatttcacactgttaaactttcacagtgaaaaatctctggcgccacgtgaatagtggtgtacagtcccgctacgtgcatcaagcttggtacggccggtcctttccggtgcaatggccttaaatttgttgcaatgtttcactcctccccctgtgcagcaacgctgtgaggcattcagcagcagcagcagcgccgctcgcagctgggcgacgcagaccacattgaagggttccagtggagggaatacacgcacgcttgctcgatgagtctcacgttggaacggcgacgagagccgtgctcgcacgttggcgccggccattccagtgcgaaagccggagcgttgcggatcggccattttctcagcagccagctcatggtgatcgctcgccgagctatcataggtagagctgtcgacgtccggtgttatcgaaggttaacacccagacgtcaaaagtcgccaaatcaacgcccccttgacaccacccgcttggtcactatttcgaaatagtgagatgccacttgtgggggctgcttcattgcatatggcggctcgcattctattttgtggcatgttagctcgactaccgtagttgactacaagctcaggaacgctagattgccaccttctaagggatcggattctctacccttaggcctacgcaccgataatacacaagtagtctcagatagcagaactctcttggtcgtgtgctgtgccgcttgtcttgtggcctgatgcgttgtcagcgaactcacatcatctctaggttgtattcccgtgacttgcaggaaggctacaacttcgtggtgacagacacgccatacctagccgccaacgtggctaagttgattgtcaattcagctgacccctcctctgagtaggcccgtacaacgtgcggcaatgaccgacagtcggccagactaaccagtgagccggaggaagagaacggcttcacaggtcccattctccctcatggagtcggaagccaagtccatcgacgactccagagacgcctgttcaaccatcggctcgtttcggtctagatgctgctgctggacgcactcctggccgacgtgaagctcatgacgacgctcgagcacgcgcgcagtgtcccgttcgcgggcatggcttgggactcactgacggacttgtgcgccgtctcggagattatggagggcggcgacttacgcgcgttgctgagtgtgtgtgaaaacaccacaggcttcgagctcagcaagttgacgatcgctcggaacgcggcgtacgtgctcacgtgcctccactcgcttgagacttaagtactgcatcgagacctgaagtcgataacgtccagctcgcctccagcctagagaccaatctcacagctaagcgagaagacgaagagatgacggccggcgttggcatgtcgcggtggatggcgctggaggtggtgtgtgtacgtcgacatgttcttggtcggagtcgtactgcccgtgttggatcagcatgtcatttcgtgttcacacgcaaaaggctgcggggatattgactcagaccacaaagtctctgaggtggtcatcatgtagatggtggcgctgtttagttttcatcaggttagttcaatcgatgccggacttgtgcacggcttgtgtgtctctggatccgacggagtggcccaaaattgcagaagcgctctaccatcttcattcaatactatcgcagaagcaccattgaaatgagttacatacgtgaagaagtttcgttatgaagacgcatacaaacattatacatgttagttacagtgttgtcatcactaactagatatatcatgctgctccattttgagccataaacaccatatcccgaactgtgctagccttcagcgaacaacgtcgttttgtaactgtgttacctgcagtggaaaacgcgcgctctgagggcaccgatgtagcgatgcatccaagccacttgcgagcaagaacagcaatagtcggaaattttgaatggttctgcttccaccacgacaaagctgatgggggcttgtcgagatctttgacctccgcctcgctcgactgcatcaagtagctgcttagctcccactcgcagtcagtctttaacttgtcgtccgtcgcagctgatgatcttgacgttctcgatccgtacaacatctttaggaagctctgtcgagcgcggtctgtagcatcagtcattcgcttttcagggctttgagaacgagctgcgtcgttgtgaaccaaagcagacttcttctttagcacgaacatcgcatcggcaaactgctcccgcgccttctcatattcatccgcagtgaaaatcgccgaattcgtcatgtaggggtcaagcaacgatatccacaaaaggtcggggtctgcctacttatcaaaccgctgcttcaacaaggctgaaaagcttcggcggacggattgcatgatggatagcacttccattgcgtatgcctccttctcgacacttgtatagagaacatcatatatttgttggttgtccagcgatcgtttgagtgaagagatgaaaagatgaacagatatcagcgtaggataggtctctccatcgagcatagtggtggcaacgctgaacgggaccaacagctcgaccaggcactgaatcatgaaccactgcttggcacttggaagcttcaacttttttgtagatcgatcgttaaactccttctcgccttcttccgacttaatgtacaggaaaaaatctttcaccgcaggctgcaaatccaaaaagcgctggagcataaccattgtgctgttccatctcgtcgggcaatcaatcaacacttttaggggctcttttcgagtagactgcagctcatctagtcgatttcaagccttttgtgagcgatggaagtagtccgccagctttcggaaccttcgaaccgctttgctaaccagctccatatcagccgagctaatttccatagccgccgatttctcggcttctgcaacaaaactggcaacttccccgcaaagcgcatcaatatcagcttcactaataaactcttcgtcttcaccgtcgtcgtccgagtccgggtcattttccaaggcatccagctgctcatctatccactgggtttccgtttccacatactgctcactgcgcacacagacgtcgttgccgagagtactgccaacttcgccaggactaacaccggtgctggcagcatcagtaactgctatcgccttcatttgtttcatctcctttctgcagaagcgctgcggctacaacgaggtgaagtgagtgcgctgcgcatgatcgatgattgagcccaaggagggtgcatccacgtttcatgttcgacgcagcatctcgtagaaatcgaacacacttcttggggtccagacgccaccacgcaaagcaacgtaacagtacatctgcaatggcttctccatcgtgttttccaggaatagaggtaacttcaagtgtccacgactttatgttgaacaggctgtcaaggtagtgaacagttaagcttataaagctttcacactttatcgaagtccaaatatccgacgaggccgaatagaagtcacattcgtcgtcgctcaccagcatcactcgcagtgacaaacggcgctctgaagcattctcgtggacacggagcgcgaccgtttgtctcgacgggatcttaagaacagtggttgcgctgtttgcaaaccttatcgccttcgcgaatcctctgtcgccgatgatacttgtaggtcgcaaatccgtacccacccattccgacaaaatgccctcgaagaagctctgttacgattcatcttctcgttcaaacaagttcaccagttggttcgattctttcagggctgcttcacgccgctcattttctttgaaagcccgtaaggcctcgatgtgggatttccgcatgtgggggccaaacaaactctttcccttcttgatggaaagctcctccttgcatccaaagcaataaaagcttttggcgtggtcgcgggtgaggtcttgccttggaatatctttgtacttgtcgtctaccacacatacgacgaactgccagtacgccttgtcccgctgcttaggggcctcaaatgcccttccagccgggcaactcgtgacgcctttggcggtcgggacctgttgaagttgttcgtgtgagcttgggctgaaagctgaatggtttaaccgggctgcattttgcatgcgggtttcggatggcgcagtcagccttgcacgcgttggtcccgacggggtacttgtcgttgaaagagctcctcttggtgtagctgtcttggatggagttgggcgctttcgtgctggtctccgcggagaggttattgttggagttggttttcttgcctttttccgaggtggctttggcaacaacgctgggcggcttcttggagacgacgctggacggcttcttgaagacgacggtgttgcgcagcttcttggaggggggctagccaccggccagacgtggcctcgcatatcggaatgagcttccatgctcacaggcccgtgagtgtggacttcgatctgggcggcgaattggaggatgaggccgacaacagaccactggtcgttgatctgaagctcactcacgcaggaaatggacggcgctccggcatttgagttcttgtccatcccgagcacttgatgtggcgcagcttgcttcgtgaatgtggcattgacgagctaagacatggcgtgcttctgattggcgttcaaataacctttttgaccaattatatggcttaatttggtagggtgtcaaggcgacgtcgataacgacccttcaccaggtgttgctgacgtccagtcgacgtccagaagccggacgtcgacagctctaatcattggtagcaaccgcgtaccgagcagtcctcgctcaatggacgccatctcgccatcggtggtcgtgctgagacaagcagcaattttctggacatacctttctatctcgatattgtacaaaatcatttatctcgggtatctattttcaatctatatattaagtttagaatacacatctgataaaaccagttcataacgtcttagagaggtattggatttcattttgcccatcagtcagacgtgacggctcactttcgccgcacgcagcgactaacggagagccaaacctgcgcgagcgccagcgtaccatcacacccgcaattccagagcagcgctcatggcaccttgccaatacgacagcaaccatgcggcagcgaacggaggatcttcgagtccgtccaatggtgaccaccacctgtccgtgaacctggacatcgactcctccggcgtccccatgacgtccgccagcgacttctacgtcgacctgcagtcgcctccgcctcagacgcagtcgatgcggctgcgactccgcaagcaggcgtccaacaactcgatgctatcggccgaggcggccgagaacctccgccggcgagtggctcgcgtcaagaagaacaaacacacgaaggaggtgcgagtgttcaagcggcagctgcagctcgcggtgcgcatcgcggtcggcgtcatgctcgctggcgtggtgcagactcacgggtccgaccgggagtggctgttcctgccggccagctactacttgggaggcctcacggtcgcctccatgatggtcatctacgcagcagccaacaccgtgggcggcgtgctggagcaggtctggcagatcgacgtgggcgtcgccatcgcgttgctctacaacttcgtcgtgttcgcctgtgtgccgatcacccagggcgacctcatgaccgtgtccaagaacatcaacggcagcacgtattacgtgagtttgcacgactggggcgtcacactcccgctactcgcactcttcacgctggtcgtgctgctgtcgccgatggtacagttataagctggtttgttgtaagaagttcttgagctaacctgttttgttgtgatttgggatacttaagcaaacaaatgtcaagaaattcgcagtgagcacgaacttgtacttcagtaagttgccgccgtacgttgaaactaattgttagtggatcgactaacctttcttgtttttgtttttttatgcagcgctgactctggttgacccgatgaaccctattttcacgacaattctcaaggacaactcgagtggtaacagctactacggcacggacaacctgttgaagcagctcgccatttacagcgcggttggcgttgtgggcactttgatcgctctagtggtcatggtgctgccttacccgattttgtacgatcgacaacaatgaggtagccttgtagtagactgcgagtacttacttacatttgatgttgtgtgtccgtgtagtgcgatgcggaagctccggaagcacatggcggcttcgccgcatgacatccgcgatatcctcaacttgattgtcgactcgtactgcttccgcgcgaaggatatcaagaagatggacttcttcaagctgcgccttgaccggttgctggataatgcgcatgaacgtctcgctacgatggaatcgctgctgaacgactgctggtgggaggagctcgtggggctcggagtgtgctttcacttcaacaagaccgtcgccaagcagttggtgaagttgtacgcaaaactactggcagatctgcacgcgatgaagttcgctattgaggccgaaacgtgccactggacacacgttgcgctgctcaagaagatgcagacacgattctacgtgcttcaagtggaagcgaacgatctgctggaagacatttcactgaagatcgtgcgttcatcgcgaagtatgtaccaatggcgttgttgtttgtattatttcatcaatctaacagtttctgattgatttttaggtatgtcctcgccgaaatttgccagtctggagcaggcgttagaacgtctcatgacaaagtatacttcgctctatgggaatctgctttctgctgacgtccacaccgccgacgatgtgggcaaaacgatgcctctgaacgtgttcgtgtactcgttccacgtgttcgtgatctcgctgctggaattcgagaagaaattcaacaagaaaaacttttcggcgcgataccgagtcaagaacttcctcaagctgacgtgccgcagtctgctgcagcccatcaactacccacgacggctgatcatcttcgcattccgaacaacattggcgatcatcattggaatctgttgcgcgaccttcatcttcgcgttcagctccactgcgccgacggctatcgcgatggttgctgaagacaacatcggcggaacttacggtaacacggtgaaccgtgtgggaggtttggtggctggaaccgtagtgccgtccatcttcagcttcttcgtctgcaaagtatcgagcgactacgtgtacaacacgctcaacaacatcgtgctgttcatttggactgtggggtccatgtacgtgtggttcagtggccgctatatggcgctcgcaggcatggtgtccgccttcatggcagcgtcggtcctgcttgaccacagctgtcgtagcacatcgacctcaatgacggtgtcttacgccagccttacgcagaacgccttgggtatcctcatccttatgatcgtggaagtcgtgattcacccgcgcagctctcgtggattactccgtagcaacatccagcagctcttgacgcagtattgtggcgttttccacgacgtatttcgccaccacgttgcgtacaaccagcctactcgaatcgctgtggggcctctcaccgaggaggacatcgagatagccaacgcgctgcttggtcgcagcaacgtgaaggtgctgaaggaccaactgaaggtcacaatcccccagttgctaaaaactcaagccaaactggtcaacgattccgccatggagccaacgttgtggaagcctccattctccacgtccaagtacacgaaggtcctgaacgtttgccgcgagctcctcgacagactggatgttctggtagatctagtggattgggctgagaatcgccgaaacagcgcgaaagacatgccgttgcgtcgctgggatcaaagtcggatagacgccgagtgtactgccgcattcactgcagcgcaggaacctccttctcccacctccgcagccgtcacagagatggtgggaggggacgataccgccgagaaacccccttcgcctgctccgtcctcgtcgctgcccaacgttactactacacctcctgctatagcgaagatcaagtgggaccaaagcttagctgtggttgaggcaggcgtcgaagaagcttttgacacgctcgtaactctcttcggagaagaattttcgggttctacggcggaagaccacgccatttacctgcaaatgaaagaggccttccgtatcgccgacgttcaccgtcgcggcgtcgtggatgtctccgagctcagtctattgctggagaaactaatgccgtactcaggcagtcaaggggtagaaggaatggagcaatacgttgatgaattcatgcagttggtggacaaggatcacgacgggaagatctcgttcaacgagttcatgcaggcgttgaacgaaggctttcgactggagttggagatttacgatgatcagccacaggtgccagtggccgacgtggttagtggctcgaacggagctcagctcacgcactcacagagtgtgcgtctaattcgcaagagttcgctaggccgtcgaaactcaattcaatcgactcagaccgatggatcggaggatccctccacccctggaagacacaaacgcgtcaccgttgtgtcacctccgcctcccgactcgcgaccccgcgcgtcgtcgaacttcgtcgacatgtcggtgtttgagaccacaaagtccgatccgagtgcgtttgaccccacggaacctaacacccaagcaaaaaatgccactggaagtcgtccgtatcgcttccgcggtatgtcttcggcaagcgagagctcggctcctgaagctttgctgaatgtcgaggcattcactctcacagaagcggcggcggcattgaagcagagctacggcgaatgcctgctggggtacgtcgacgaccatagcagacgtgttacgatggaggacttcatcgtcatgagctgcgtcatcagcgcttgtgaaagtatcgtcgagaatttaactcgcctgaatacgctggcagcctcataaaatggctgcctgccaagcgagaactatggattgaattgaaaagtgaaaagttgtgcatacttctaactactcgaatttgattctgagtttttcctcgtaaattccaaatgtttcacatcataatcttattaaggtttgtatgtcgacttaccaatatcagtgattactgtcaaattcattctgtaaatagactttttaacgctagttggttttggtgcccactccctttaatagtgccccccttgtaacaatgccccaggttggcaggggggtactgctgcaataccccacggggcataattacagttttacagtaattaatgatgcatatcctggtcgggttggggtgacgccctcccgggaagcctgggcaagcatgctgctcgcccaacgcttccggcagacgcttcacggcgtctgtcagtctttgacgggtctctccctccccacatctctctctaaccacccctctcacccccagctcccagcaacgcagccacgacgccgcccgcggaagcccgctcgccatctccggctaggtacgttaaacgtgcaatccgttggctcccagcgcaagcaacatgagacgctccctcgagacctgtcggcctaccgcgtcgacgtattaggtctccaagaaacccgcataccctatcaaagtgagcagaaggctggcaagtaccatctcctgactctaccgacatccaaccgatggcatggcattggttttgctattgtacctcacctgcgtaagttcctgtataagtactgggcctattcggaccgtgttggagtcgtccaactacgcatgcccaaggtccagcgagcgaacatcatcaatgtgtactcaccgcacagtggctacacctctatcgaggtcgaccgtttctacgaggatcttcatgcaatgctaacctaactctcacagcgcgatacgacatttatactggacgacttcaacgcaaaaattggacagcaacgcgaacacgaacccttcttaggacaatggggacgtggccgacgcgaccgcaacggccacgtactcgcctccttttgtggcgctaatgacttgtttatttctaacactgctttccgaaagcgcgcttgcaacatcacgacgtggacgctccgactcacgcaacacagcatcttcaaccaaattgactacatcatttgcagccagcagaataaatccctgtgtgccaacgcacagtcgtggagcagtatcctcacaccgaccgaccacaagctggtcacgctggactttgatctccgcgcactcggtgggctccggcgtcgagttgccagagtccacttcaacaacgccgagactcgcctcgccacgcacctcctagtgcacgaccaacgctcccgactacaataccgccatctactatccgctacgatcacacaaggggggttcgccaaatcagcgctgggcgacgacgctgaacacagcactggaatcagcagcagactcgattggataccttccactcgccaaaagcgccaaaatgccggatccagaactagcacgtctctcctgcgaacaacgacgactccgtctagccatctacaacgaccgtgcgctggacgtcgatgacctccgccgccgacgcaaccacgtacttcacaaaatcagggagcgcagcagacaccttgctcgcacttatattgacgagaaactaaccgccatagactgctctagccattcggctaggatgttcgaggcaacgcgagtgctgcttcgacagcgctcaccactaacgtctctatgtgactccacaggtaaatacattctccaccgcaaaacagcaggagccaagatcagacaacacttcaaggaacagttttacgacccgagccgacagcccgtccccagcgacagcgtggctcgccctctggagaggcccattacagccgacgagctcgcacgcgccttccatcgccttcgcaatggcgacctgacgccatcccagctgagctactcaagtacggatctacgacactagctcaacctctcgctgccatactcaacgacgggttctctactggagcaaacattcatctgggcgacggaattctccttggacttccaaagccaaacaagccggctggtcaatgtgccagccttcgaccaattgtgctgctcaacagcattcgcaaggccatctcgctcgtcgttctcgagcgcatctccccgaaggtcgaacgctttctgtcccctcaccagagcgggttccgacccagtcgcagtactgccgatgcagtatgggcccacaggtggttagcagcacgggcgcagagattcacggaacggttccacatactggggatcgatctctcccgtgcttttgacacaatcaaccgcgacaatctccttctggttctcgagtcgattgtcagcagcgatgagcttcgcctgatccgactactcctacaagacaccaagctcgccctccgattcggcaacgacttgctctctccgtttgagagcaacacaggtaccccccccccaaggttactcactctcccctgttctttttgttgtttacctcgaagcagcctttgtaatgggcctactttggctcactactttagcttacacgtgtgcgcgggtatgtgaagaagcgtagcttagtttaccttagagttaattatactcgggcctccgagtatagattaatctaaataaacgatccaaataatgttttgggttaaaatgagaactgctatttttgttttatgtttctgacttcctctaaatgtaatattctaagataggaatctgccaacggctggttggcagaattccaatgctatgcatgtcgctcattggctaagagatgctgctctcagccaataggaatcctaagtctctatggaccacccgtcgtggtggtcgtaaatgtatgtagcatttggtgtgtctacaccaaggtcgagaaagtctttcgaatctctaacagacgtcgtgtctgttagagttacaagtgactgtagccacttgtgcgtgtaaccctgtcacaccatccccccctcaaggttagacgcgccgagtcacggcacgccaatcaggaaattgaccattcgtcaattcttcacgttgggagaaagaaaactcgagctcattccgcaatgagctcgccgcagaagaagactaccgccgcaacagagggtcatctctctgttgctcagtaccatgagcgccagcaggcaaagcgcgacgcgctcgctgttaaggccgcgtcggggacaactcagtcggagattgtcctcgaaggttcctctgtagtcaacgacgccgttgactatgggagtgacgacgtagtttggagatggaagagggcgaggcctcttctagcaagcgcaaggagtctatcgacagcgatagtctagacccgcatgccgggtcgagacgccctcgtgaaagagacgactcggacgcttcgagctcgaagcgttcgcgcggcgagagcgaaacttcgctctccgctgctgaggctttaagctccccgcgtgaggtggcgtcttcaagttctccgcgcgctgctcaggcagcgcgcgatccgtggatgccgtctacgtcagagatcgcagaccgtgtgggcaacactgtgcctccaaacgaaatcccgctgtacgtatgcagcgggatccacgatgatgctgtggcggaggagcagcactttgatccgttaacgaatcaaaggcgcgattactatatcggactctttcacgagctccgatacttctccagcaagaagacctcttctcgcagcaaagtgcctgagtggcaggcactttgtcaaagttggaatgcttttgttgagaacttcaacaagaagccggctgcttaccgtgagcgggttaagcacgcccgtgaacgcttcgagacattctcgacgcgcgggaggttggagcagctccacagatcttctgtggacactggtattccatgcgctgtgcccgaaggccaacagtgcacgttgtatcttccgggtgcggcgtgcttgagcgaccgcgacctaaacgggtacacgacgattcgtgtacctgcgagtctcaaggatctccgtgccaagttcttggcacgtgaggaacgcgacgatcgtggggcctcgggcgctgtaggtgaccacagcgctcgcactaccttcgcgtcggcagtgcgtggtgagcttcgtactccctcaccatttccggaacgtcctgcagcagggcgtcccgtggctcccatgtatcttggtggggcggaaaccctctccaacgaatacgataacgaaccggctgccgcttccttttcgggatactatggttcacaatacgctcaacaatccagcgtgttgagccgcggacgtcgcggatcggaggcgtcggtggtgggaacacgccccgcgcgtctgtgcagggcacagacgcgcggttcttggctttacttcgtgtcgttgcggctgacactgtacaagtgtcagcggcattctgcggctgctgcgttgcagtcgtagatcctcccccacttaaggaaggagccaccatcccgagtagactcgggaggcgtgggtgccagatggcattcacgtagaacggtgtatgcccggtcgaggcatgcaccgagttgttgatggcgaactccgccatcggcaggcactcgctccagtgttggaacgagtgagcgtagctcttaagcacgtctacgagcacgcggttcacgccctcggtctgcccgtccgtctgcggatggtccgcagtcgacatcgaaagttgactcccaagaagtgtaaacacttcttgccaaaggtgtgcagtgaagcgcgggtcccgatccgacacaatgtcgatcggcatgccatggtgtttgaacaccatgtcaacgaacagacgcgctgtctgcttcgcagtcacttcagcgggtacagcagcaagatgtaccatcttgctgaagcggtcaacaaagaccacaacgtccgtgttcctctggctgtccgggggaagaccgatcacgaagtccaaagacatggactgccaacactctcgtggagttggtagtgactgcaagggagcctgcgcgaaaggcgcaggcttcacacgttgacaaacctcgcaagcacggacgtacttgcacacccatttatactggtgggcccagtagaagtcccgcgtgagaagaaggtatgtcttctcacagcccggatgccccgcagtcggtgcatcgtgatactcatacatgatcctgagtcgcaggtcatgatcattgggcacgacaacgcggtccgcgttgtcgtcgactgcactgtagagtaataacccgtcatgcacccgataacggtgtgcacgagcacgaagatgcttcggcagcttctgacgagctttgtcagaaggcgctgagccgtaggccagcaagagcttcgcgtccgcgtcgtgcgcgaacgcgaccttcacgtcgtccaacagtgacgacgttagggtgctcgatcgcatggcgtcaatggcattgacgtcggcatcagtcgtggcgtagtccggtcgacgcgagagcgcgtcggccaccacattgagtcttccgggtttgtactcaacccggaagttatactctgcgaagaatgagagccatctcgccatccgttgcgagatgtgcggcgacttcacagccgtccgcagcgacgcgtggtctgtgtagaccacgaacggtttgcttccgagttgatacactcggaacttcgcgagtgcgtacttcatggcaaggagttccttgtcatgtaccgggtagttgcgctcagctggcttcagctgacgcgattggtagtagacgacacgatcacggccctcgtggtcgtgctgcatcaacgcacatccgattgcgaagtcggaagcgtcacacacacaacgtggaatgggcgatcttggtcggccaccgccaagatcggcgcctcagtcaagccccgcttgactgcatcgaaggcctgctgacactcagcagcccaaacccactcggcgtccttcttcaggagctgtgacagcgggcgtatcatgcccgcgtagttgttcacgtacttgcacaagtacgtggccaagccaaggaactgccgcagttccttgacgttcgacggcgtcggccactcattgatcactctgaccttcccagggtcagggcggacaccgttcttcccgacgagacacccgagcacgggtatctcgctcgccccgaagatgcacttcttcaggttcgcatagatcttgtgcttgcgcatgagcgcaagcagcttccggagatgcaccttgtgcatctcaacatcgctcaccccgtccgtagcccggctgtgggcgaacacatcgtcgaagtagctcggtgcgaagtcgcgcaccgagcgcaacaagtgcgtcacgcacctgttgaaggtcgcaggggctcttcagaccctgcggcatcactagccactcccagagcatgcggctcggcgtgctcacggccgtgagagggatatcgctctcacgcatgaggatctgatagaatccatcgtacagatcaagagcactgtagatagtgttcctggccatcgaatcgatgatgacatcttttcgcggtatcggtgtctgcgccggtatcgtcgcatcgttcagcttgttgtatgcatgaacgatgcgccaaccgccctgtggcttcttgacacagaacgtcggagcactgtgcggggatttcgattcccgcacttgtccagctttgcgacgactctcaaagaagtcgtcggtcgccttgacctgctctcgcggcagtggccactgccgcgtgacacggtacttcgtcccaggcacgagatcaatctcgtgctggattcccttgtcctgcggaagctccgcaggaatctcttccggaagtacgtccgcgtactcccgtaagatctcgtagtagggactcgttttcaacgagtcccagctctgctcttcaaagcgctccttcttcgtcttcgcactgagagtgtcctcgctctcagtggtggtctccatgaagaactgcctcagttcttcatactcgctcttcgttctctcggcgtccgagagaacgcatattggtcaatgcgtccatcgtgcaagtcacgcgcgaagcgcttccagctcatgactggaagcgaagtcaactccgacgcttgcgtcggaggattagcgagagttatctccctgtaccggaacccggcacaggtacgcgtcaagacgttcaacgtctcgacgtccggcttctcagcctccgtctgcccggcagacattccttgtagcgtctcggccccaggccgagacttgcgcagcgaccttcgcatgcgccgtcttcttgttttgcggagcccggctccgcttggttcttgacctcgtccaggcccagccgtggacgggtgttctgctttagtaccgccggcgggttcatcccgcgggcgagcgacttcaagcccggcttggtcgcccggcgcttcgtcgtgcagcccggctgcacgacagcatgcaagtttttccggtgcgggacgtttgcaaccgtccgcaccgcctgcagcgtcggctcccggagccaacacgccatcttcacctcgacgcctgttattggcggagccctccattacggagggtgcgtcggctccccgagccgacgaatcaaattcacccaagccatcgactcccggagtcgacggcgtttcatcaccttggctcttattattggccaaaactgatccaatcagattcgcgtcagcctccacggctgaggcgtgtgactcgcctgcgtcatccgtgccccttgaggtcagagactcttcctgatttgctgaaaagcgggtgtcgatctctgagatcaacacattttctccttcagccgtcggcggcgacgccgacgcttgctgctcttgcgcgcgtgctcgcgcgcgcccagggcgctccgggacagcggcattaggcgctgtctcgagtggggagtcgcgcgcacctgtcggtgcgtgcgtagcggcaacagggccatcgctcagtgttccgctgtcgcgaccgaagcgcacgagagtgcgcttctcccaatcgatgaccggatcatgccgtgcaagccacggcatgcccaatacaatgtcaaacttatcgtccagatccaggacgataaaggtctcgacaaactcttggtcttcatacgtgaagcgcacgcgtaccatgcgcttctcggtcttcacgacggcactcgttgccagtcgtacttccaacatgcttcgaggtatctttaaatcctcgaagtccagtcttgatagaattcgcagtcgaacaatgttcttcgacgcgccagaatctaccaaagcacggcgagagccgcttgttctcatcgagttcacattcaggatgacaaggtcaggcttgtcatcttggttcttgcagtgaggatgaacctcactgggggctgcagtcctcagtttcgcgtgtccaaggtcggcacgcggaactgcattaccagtagggcgccccgcgcctactggcgtccagcgttttttgtttggttgcgacggtgcccggcaccgccgcgatagccaccctgctggtgcacgggggccgtgcactcccgagcaaagtgaccgactctaccgcaacggtagcatcgcacattgtttccctgcgactgctggggtccagcagttgcagcactcgagaggtccatgggttctgggcctcccgtcctcactaccggtcgtggctgtggcctcggcacatttgcatgcagcttagcctgccgcaggctaaactcctcctgtattgcaagagtaattgcagcttcgagagtactcgggtactctcggaagagataggtcttcacaggcccatctctcagtcccttcatgaacgtgacgaccttggtcacctcgtcgatcggattggtcacgatgttcgagaccaagtaccgtgctctctgagcgaaagcatggacatcatgcttgccctgctgcaggtcgaggaactccgccctcgaccggaactcgttttgcgggggctcaaacgcttgtctgagctcctccttgaaaccctcgtacgtgctaaagcacgtaggatccgagagtcggcgtccatacgcccaacttcttgcacgtccgccaagacatgacatggcgaacgcaaccttcgacaacgggtcgacgatacgtcgagccgcaatggcagtgtcgagttcgacaagccaacggaggagaggttcgccctctcttccgacatagttgctcacattgagcttcagcgattgcgcgcgtggtgtcgtcccggacgacaccgcggtagtagcagcaacatcgcgttgctccttcaggatgaaactcagagcaacaccgtgttgctctgtcggcgttagcgtacgcagcatcgtagctacagccgcctcaccaatgactgttggcagtcgttggagggccttccactctggatccgacaggtgggggcagtcagcgcgtgcaacgtgagttgcaggcgtagtggagctttccatgggcacctctgtatccatgggaaggttctcagctccgcgttcgtgcggtgacgtacgaactcaggtagtcggtcgttggacggactacaaagtgctaccaggtgtaatgggcctactttggctcactacgttagcttacacgtgtgcgcgggtatgtgaggaagcgtagcttagtttaacttagagttaattatactcgggcctccgagtatagattaatctaaataaacgatccaaataatgttttgggttaaaatgagaactgctatttttgttttatgtttctgacttcctctaaatgtaatattctaagataggaatctgccaacggctggttggcagaattccaatgctatgcatgtcgctcattggctaagagatgctgctctcagccaataggaatcctaagtctctatggaccacccgtcgtggtggtcgtaaatgtatgtagcatttggtgtgtctacaccaaggtcgagaaagtctttcgaacctctaacagacgtcgtgtctgttagagttacaagtgactgtagccacttgtgcgtgtaaccctgttacagccttacgcgatcttgccggccaacttgacgtcccccacgacctcctcgcggacatgattgtatacgccgacgacgctgacttcatttgcagacacgaagatatcgctaccctgatcgaactcaagcaccagccatactccactcaagatgaacgcttccaaaacggaacacacaattgttcaccgcagcccgacagcccacaccactcggatcgctcgtgccaaggatgaagcctggcgcaacactcgcaagctcggctctctcctcggcgacaccgaagatctatcgcgccgtaaaaacctagccaccgcagcgctccaccggatgtggaagatctggcttcggccgtcaaaaacctcgcaagcgactcgagtccgcctctacaacagctacgtattgcccatcctgctttacaactgcgggacattggcgttaacacactgacctccttggcctcgaaagttttcaccgccaacaactccgcaaagtcatcggcgtggtctaccctcgaaagatttccaacaccaagctatacgaccttaccgggacggaaccgctacgctatcacctcctgcgcagccgatggcgattgttcggccatatccttcgccggcccgcaactatccctgcataccgctacatggacgcttagttcaggccgagcgagtcaagcaaatggagaggcagacaacggctcacgcttccgatggtcctcgacgccgacctccagactctttcttccgggcaccgtcttcgtcgttcttccgatctttacctccttcgcctttgcgcgcaggatcgaaaaagctggaagcacctgacggaggccctacttgcgtacgtgccgattgacggactctggtcgagagcagagagagaattagagagatgagagataacccgacgcatgcggaagttgacccaccaaggtggtaagacggctcgcgtaacgcgttcacaatacaataatgatgcatactatatgcacggacatttcctgcatgtacacagtgctaacactaaactggccaggctgaaaatacccgtagtattattagggggagtcgatcctggcaaaaaacgtgctgagttttagggcgatttgatgttgattgtaatgtagtgtaatgtattacgttttcgcgttgccacagctaggctcagctttgctagtcgacggcataaggtggtgtccgcatacgtcgggtccttcttcgccggcagtgtggcgacaattgccctctcgagggctttccatttaggtttctcttgtgcaagcagccgaagttggtccaggtcacggcgggtctcgaggcgataggcgtatccgctcgagataaggtccgcatcgagcacagtcggtagggtcgtgcgtgggcgtccacgccaggttcccttggacgacgagtcgaagtaggcgaccatctgggtgtacgctgggatttcgggccggcgcaggatgtggccgaacagacgccatcgtgctgctgtgattctgtggcggagcgggcgttcctgacagatttcgtagagcgtggcgttagagattcgctgagggtagcgaatgtttagtacgctacgtagttgtcggcggtggaagctttcgagcccgctcagctcggacggcgtcagtgcccacgttccgctgttgtacagcagaacaggaagcacatagcagttatacagccggactctggtggcgtcactgacgtactggggccggatccatattgtccagagccgacgtagcgcgcctgctgcgagtattttgcgtcgtgtcagatcttctgagtcgccgagtagactgccaagcttctgtgtggagcgccacgcctcttctgtcgcccgagcgtgtcgggagtagcccgacgagcctgtacatcgctgaatcatggttagttctgtcttggttgcattcatctggagggaccagcgtgcgaacactgctggtgcttcggcttggatgcgctggaccagctcggtatcgcggcagacaaagtctgcatcatcagcatagacgatcatttggtcgagaagggtccgattcactccgaggtgggatgcgaggtcgcgtaacgcagcttccacgtagatgacgaacaggaccggtgaaagcgcatcgccctgcggcgttccgatgttgctatcgaagctgtgttaagccttggacccggagcgcagagagagcttggtgtcggcgagcaaaaccttgatcaatcggacctcgtcgtcgtgtaagaatgtctggagtacttctacaagcttgacgcggtcgattgtgtcgaacgcgcgcgagaggtcgatgccgaggacatgtatggtttcacgatagcgttgcacgcgggcacagagccatttgtgcgcccacacggcgtcagcagtgcttctgtgtttgcggaatccgctttgattgggggacaggaatgtgtccaccgcagcggatatccgtgcgagtacgacgagagataaggccttgcgaatgctgcttaacagcacgatggggcggagactggaacatacacctcggggcttgttgggcttgggcatgttccttcaccgagtgcgaggggggtgccttgctcgaagctgcagttgacgaggtctgcgaagagaggcgcgaggactgaagccccgtacttaagaagttctgctgggagctcatctggcccagcggcgcgtctgttgttgaggcgccgaaaggctgcttcgacttctgttgctgtaacaggacgggttagagatcgcggttcacgatccggaacaggatgtggccgccccgggtcataaaacagcgttcggaagtgatcggtgatcatcttgttagtagtttgttgccgcaggatatacttaccttcttggtcgtggagtaacagcggttggggtcgatgggggctaatgtctccaactgctgcatacattcgtgccgagtcgctcagattttcgatgcgtgtaatccgctcgtccagtttgcgagatgcgatggctcggcatcgcactcggatttgatggagaatcttgttgcgggcggctcggagctcgatcgtgttagcggcgcagtcgttgtagattcgaagctgaagcgcccgctgggcctcagagagcagctgaagttcatcgtcgtgatgtcgtacgtggcggtggttaggacctgcgaatcctatagtcccctcggctgcttctcggattcgatcgagcgtgtctgtccagcgctggagaacggtgctgccttatgctgttggctgtgaaagcgctgcctgaagcgcgttcgtgtagtcgtctcgtgctgtgtcgtcgtagatgagatgatctcgtgctaacttgagtgctggatctggcttgaccgtgctgtagcggagacggtgagtggccgcgttcaggatgaagtcggcggtgacgagcttgtggtccgacgccgtcaacgttccaccccaggatcgtgcgtccatgcagagccgtcggcagttctgagggcataggatatagtcgatctggttgtaaatacagtgattcgtccggcgctgactccatgttgttttgtggcgggctcgcttttgaaaacctgtgttagtggcaaagagaaggtgagtagaacagaagtcagctagtgcgtggccgtttcggttgcgtatgcctcgtgcatgtggtcccatgaatgcctctccgttgatctgttgtccgagcttggcgttgaagtcgccggtcacgaacgcgatgttgcgccttggtagttggtcaagtgtgtcgctgagatcagcgtagaatcgatctacttcggcgagaggccgaccgctgtggggagcatacgccgtgacgatgttcacggcgcctgcgtgggggagtaagagctgaacgacgccgattcgatcgcagtgtgcccaatagcagtgtaagtaggggcggacgcggggggagatggtaaagccgatcccgtggcgctcctgtacggctggtagtgtgagtagcgtgtagtctccgatacgtttcttgtcgagggtgcagatgcgtgttacttggatgccgagaacgtcgatgcggtagcgccggaggtcctgggagagcgtgtcctgctgcttgcgggtcgaacctaacaactggacattaaacgaacctatcctaaaacggttagtttgatgcgcgcggcgaggagagcgcgataagagggtgggaggtgtagttgtcgctagtgctgccggcttgggggcgaaggaaagacccgctagggacgtacagatgcccgagagcacctgccggaagcgcgtagctagcatcatgctggccacgcgttccggggggggcgtcaccccaaccccaaccaaaaattgatgttgattatttcggcgaaatcttgttgatttgaaaaatcatcatgatgatgtcgaacttcaagtggtaccgcttgctgttccctcctcgacctctgatacaatttcagctgtttttgaattccttcctcacctagaaattgttgtgtatgtgtttaggcaagttttcacactatcgctttaaacaagttttagatgtcaactcgcgaagatggagacgttgtgagctgctggacagtgttacgttggagtcggccattgctaggtataaagctgaatataagaagatgtatatgcactaagcaagagcctgcgcgtgctggcgagaaaggaagtgataattcgctgttttcaccaactacatgcgaaaacggagtgagtaccctactttgatttgttgattttggggacagaacgttgctgattattcggccccgtctctgttgatatttttgtcgccatttttaaggttcgactccccctaatagggggagtcgaaccttaaaaattacagcccttagtctttctctaaaaaccttcgtcacccactgaatttgccgtctcactatctcggtggcttgagcagaagccttttgtgttcgctcttttgctgcatcctttggctttgcacgtgctccagccgccatgggtgcaacagagacccttgaattgaacgctttttatacagcccgggtgcttgcaacgcttgccacctccatgctcgatgcagtaccccttcatatctcccttcgacagcccccacttcacgcagccctctgctttacatgtaatccggccgccgtgagtgctgcataaaccctttgaaatcgccaacttcgagcaatcaggatgagtgcatcgagcgccacccccatgactgatgcagtgcccaccgacttgcgccgatttctcgcacccctcagtttgacacttgcgccccacagcgatgcccctctccttggcgtgtttcgtgcagtacccaccgttcagcctgtatttcggacacccctcgaccttgcacgtacccttacgcttgaccactccgtgctcagcaccatgtcgatggcaatagccttgaacactaccgattttctcgcagccttcaattttgcatagtgtgccacctccgtgggttcgacacaaccctttagagagagctttcttgccacaaccttccgtcttgcacataacagaacctccgtgagtggtgcacaggcctcgggcttgataccgcttcgtacaacctggcaccgagcagttcttcttgctgccgcctcctccgtgctcctcgcatttgccgtgagatcgcaccagcttgtcgcaattctccacggagcaagtatttcttccaccatgagcggcgcagcgaccacgccagcgagatatcgctgtgcaatccggatacgtgcattctctgaccccgccgtgagcgatacatttccccttggcttgagcttgcttcgagcatcctggatgcgagcagcaagctctacccgtctcggtgagaagctgcgccggttcagcatcttgattgtcggctgtgacggctagaaactcattggcgagctctgagcacgtcgcatgaatctgctcgctgcaccttatcatggagtgcacgcgaccagcagcgaacttgagaccccacgccatctgcaccccaaactcgattgaagcttgctgtgacgctgaccgagtgctcgccatgaactcgtcccgactccatttctctggatcctcttcttcattttttgcttcttcttcttctcttccttcttgttcttgcttctccatcgtcggcacaaatggcaacgtgcgcttcttgctcattgaaactttcaccgataaacttcccccctcccctcccgtggcgctgagcttgatcagtccgtctgctgcccacgccttcgaactcgagtgatccggtacaattctcaccgtctcgaagcgacttgaacttggaggagaagctctcgctttccccccattaccttgaacaattttctcattgctgtccacgagcgtgttgccattttccgcgttgaactcgtcgaggaaaaactcgcggtcgccgctgggtgaagaagtcgcggttgttccacggtctccgatgctctcgacacgtggcggaggcggctttccggcgctaatactgagcgttgggcgctggttcttggacacgcggactattagctgctgggcagggagctgtatcgccggtgcctcgagcgcgtgagcggcggcggcggccgggaaggaattcacattcggtccgtccatgacattagcgtttgagttttgttctgaatgtaatgtcgcattaccagataattgcggataactcgcgtacttacatcgtacttatgtcgtacttagcgatcgatttgtagtttttgatattgattttgatgtctacagtacctttttttacgtctctcagtataattttagagagacctgtgtcaagcggaagtgtgccaggatcgtcgcttgagcaggagaatgagtgttggcggccataaaactacgcgtagcggtacaacaagcggtgaggagcagctgatagtagaagatgcgaacgagatggatttctttctcaaagctttcaggtctacacgctgtatagtacacgcgcagtacgtgaaaagttgaaggcgcagagcaaggagatcgcggtcctgcgacctaccagtgcgatacagtggtttcgagaacgctacggcaggtgtaagcctgagcctaaaatatttgacaatattgtggcaatacaggacgagcaacaggaagttcgtgcaggcagatttgcggcttcgcttcgagaagaagaggctacacgaggaaagaatgatcctgggactgctggcagggaagaaattccagctaatattactgaaaccgcggcaagtgatggacacaagagccaagtaactaagacgacagcgatataggctaccgcggggggtgttgctttccgcagcagtttggatgcttgctgtccagaactccaccgtgactgatgcacttccctttggcttgagcttgttttgtacattctggatgagagcagcgccgtctacaaattgccaagctttttgctacgccaacgtctcctctggaggcaaacagtcttgccaaagcgtcactttccacacgagccgcatcgtcctcggttattacgcagcgagcagcggtagcagcaccgccgtgctggcgtattgaggtcaagtcgcgctcagtttgagggtgacagagtcgtaagttggttccaagttgagattgagccatcacgccagcaactgaggccaaccctacgggcagcttcttgacctcttctgctgcattgttgtcgacatgttgggtacttgcactcgcagggaactgcaaaagcgtattttcccagtcaaatccatccaggaagaactctttgtcggcttgcagcaccggtgtcagcctggctggtgggtcaatcgattccttgtaggcatgtcctcctcttgctttcgctcgcgattcagatcttgttccaccgcagactgcatcgctggtagctcacatatctgggctgcgttatcgaggtccttggcgtccgttcgaaaaaaaagtatgaaaccatttccgtaaaaaaaaagaaggcagacgcctactttgacatctatcttaaacattttattgcatgcagctggctatacggtgtgcctgcaaggtatctttttatctatggtaaagcaattaactcttaaagactagagcctctactcctctgctattcctccatcttccgcggtcttgtgatgactgacgcagagtccctgtgattttacgcgcttgttgcagccttctactttgcaagcattccagccgccatgcatacagcacaaacccttgcattggacacttttagtgcatccagggtgcttgcagcgtttccctccgccgtgggcgacgcaatatcccttcaaaagccctctagagagaccccacttcttgcagccttccactttgcacagtacgcggccgccatgagcagagcaaaaccctttcgaggagactggtttctcgcagcctaagtgctggcaacgagccccacctccgtgaacaatgcaatgccctccagattgagctgacttctcgcatccttcggtgcggcacgtgactttcaggaagagacccaactccttggcgtgcttgacgcagaaccctcgacagatttggatctttaagcacccttcagctctgcatttgcccttgggagtaaccttgacaacgccattctccacaccatgcttgtagcagtagccgcgcttttgacgcaccttctcacatccctcgaccttgcaacgatcgtctccgccgtggaggtggcacagtcctttcgtgacagccctcgcttcgcatccttcgaagctgcacactgggaagccgccgtgagcaatacacagccccctctcttgagctttcctcgtgcattctggcaacgagcacttcttctcatgcttcgcacacttgccactaatacttcttatgacgtttttgcagttttcctccgaacactcacgccgcccatcatgcttatcgcagcaacctctccagcgaccttcttgagtgcatcccgggtgtttgcaccgcgtaattccgccatgagctctacatttaccaaaagccttcgcgtatctggtgcacccagggtgagagcaatccatgtagcgcacagcaacgctacttggtgggattattccacctatttccatattggataagacactgttgagaacctcggcatacgtccgatcgctcggggacatcgtcgagttagagctgacgttggcagtctttggtgtactcgagctgaatagcctcgtatcttcgggaacttgttggcttgcatccgcgttatcgaactcgtccaggaagaactcgcggtcgccgcttgacgtagaaatctgccactcgcacgtagtaggagctgctgctttctcttcgagttcggtacttgggtggcgtccagtcttgggcttgcacgcgcgctctatgagctgctggagctcctccatatcgtggagctgcgctacgaagtcgttgacgtccgatgcgtccattgggagcgaaaagcttctgcgaggatcaggaagtcgtgtactgagcgacttttggaagtagtagtaacgttttctcgtagtgtagtgtacttctctacttggattcaatagcgttttatcgctcgtggacagcgcagtagcctttcaccctaacatttgtgtcgcatccctccgcgtcacacttgagtttgcctccatgaacgcagcacagccccttgtattggacgctcttgttgcagcctgggtgcttgcatcgagtgcctccgccgtgctggacgcagtatccctttagctgacccgaacttagcccccacttctcacagccctccaccttgcaagtcttgcggccgccatgagcagcacacaagcctttcgtgacaatcggccggttgcagtcggagattttgcagcgcgtgcctcctccgtgacttaagcagcagcctcgggactgtgagatcttcgtgcagcccttaactttgcacgtcttgccgacagtgaacccacgctcctgggcgtgcctggagcagaatccgtggcacatttgaatcttcagacacccgtccgccttacacttcggcttctgatgaaccttaaccacgcccttctcgacgccgtgcttgtagcagtagccgcggttcgacatggccttctcgcagccttcaacctggcacatcttggctcctccatggcgtttgcagaggcctttgctggaagctcgagcctcgcagccctcagtcttgcacacagcaaaccctccatggggcacacacaagccgcgcttttggacctttgaggtgcagcccggatgcgaacactgcttatagcaacgaccaccatgctcttcgcactttccggcgcttcggatgagcttggagcagttatcttccgagcacacgcgacgcccgccgtgctcaacgcacacaccgtgccagcgagcggtggattcacagcctggatgtttacagtgcgagactccttcgtgacgcatgcacttgcccttcatctggacctggttggtacaccctggctcggagcaacaaggccgtccggtagctgttagccgagacgaggtctgatcgtcttcctcgtcgtctgaaagagagctagattccatgcacctgatcatggagtgcagtcgaccagcggcgaacttttccccccaccacatctgaagagccaactctcctttagcctgctgcgtggccgagcgagagccgcgcatgaacacacctcgactcaagtatcccacgacctcgtgttcgtcttcttgactcaagactcgaggcgttgctacgggcaacggacagggagcatcgcaccgccagacttccctcactcccttgtgactgcactctagtctgcactggtacaagtatctgtgttagatagaatctcgtgcttgggtcttggctgggtggctgttccacgccactgatgaaggtgctatccgtgtcgaattcgtccaggaaaaactctctgtcgccgcccaacgcggaatattggtcacggtctccgctatctgcaagcgtctccgttgtcgacggtagtgcgtcttgaaggttgagttcctcgactacggattgctgcacctctggcgttgcacatatcggagcgccgaggacgccgcccaccgatgtcgccaaggcctccatatcacagggatttgacaatgcacttgggccaatcatctcccagaccaagatagatcagaggccggtggctctaaaatatctacaaggacattgagttcgcagtttaagcttacttcacttcatcactattttacacgagtcttcttggcacacaggtcctttgcaccactcgacgccgaagaacgtggagacgccgaaggtcgggtcttgagggtcaagtccatccaggcggtgcaggaccttgcggtagcggagtgccttgagagcgatctgggcatcgctggagttggcgtgcgggtcttcgagcgcagcttgcaggagtcgctgagtgttggcgcagaatcgatcgcggaagtgtttgtcgctgtaaataagtggacgcggggctgcgttgatgcgatctccgcagacccgtcgaggttttgttggtctcgcaaggtctgaagcttttcgtgcagcctgtcgatgtcagcgttgcgtggcgacttggaatccaccatgttgctttgatcacactggtcttccgtcataccgagaaacttcacacccgtcgcgctaagtgcgggaagatcggtgggcaaggagcacagtcgaagcggtaagaacatcacacgtcagacgttacatgcgcaagtcgggcgttttttcagtagggagaaatcatgcccagagttcagctccggagccctattgcctcttgcagcccagcaccatcgcctgtaaccgctctcgtttgagccagtcccctcacttgcagactagcaatggtatgcaatggtatcttgccgtgcgggcccgcaaaagaggtcgaagatttttcctgggacccgctcggcccctcagcgggaggtcccgacctggatctgttaccgcgaaggacaactgctctacatttccgtcatctatttacatactcacgtactcagtttcctttagcggtgccttctctcacggagggggggggggatgtccgccgcatcatgcgctgcgagatgctgtcattgcagctgcacgcaccaggctgcgacggccattgcacgtaagcaatccattgccgtgctgttcactcattcaacggggatgtccgtcccctcgtgcggcacagcggtacagtacagtaacccccgccgctagtcgctacgacgagcctcaactaacgttaccgatgcaaagcgcaataggtttgagaatatctcacttcgctgacgttgccctcgagttttagtagatttctgactacatggctgaaagccaccttgcatccatggcaaaccccacattattgcgaagaagcgcagagttctagaactccgaagtgtgtcccccaagtagccgactttgcttttaaagtacacaaaaatcagcaaagcactggtgccgatactccgaatcaatactgcatgtcggagttctaacgcaacgcattcgtgaaagtcttgcactctttccttcccgttgcctttcaactttgtgcaataatactgctggttatctcgatatctcgacctgtggtttatccaacaattttgcctgtccgcaacgtcgttgaacttggatttaaattaacaccacacggatctcggtatattcatagccgagtgcatcggtttgcgcgactggacctacgtagcgaaagcgggtactgtggactgtgaagattcaaagtcggtggccgatcgtcagcaacaatcgaacccagagcaaaatggtgagaatatactggtggcgcagcaagacagcactttcattgctggcagatggtatccagatatcaacgctggctagctgaccattagtttgctatttcagtcctaccaaacttgttgaggggctgacaaaaccttcaatattctaaaacttcgagactcgcttctcaataagtacttaagtagcaattaccagcgatgttctcctgcttgacatcggagatctttactgcagtccttaataaaaacaatggaattttccgctaaaaggtcgataacaattagagagacataagaatttgccataactcatggcacagcaaagccataactcatggtacagccatccatgccgggcagttgctttcagcagttacgtgatcctaggaactgcagctcattccgaggaagatgctttccgtcacagtgggtcctcgacgaacgtcatcgacgtcgttcggccatatctttccggccgtcagtttatcgcagaggtctgtaaaaacttaggtaagcaagacccacggggctcatttctgtattctcgatcggccggacacacgactacggcccgagaaagggccctaagagacacatccacgcacaataactgagtaccacacaggagcaacatgacgcaggatcacccggacatcaacggcatcccgaattttttgcagtcaagcagcactgatctcggcggtgccctcggacatgacatgttggaccacttgaacgagaagcttcgcgccttgcgaaacaacaccaagcggcgacacctcgacgggagagccgagagcgcatcaaacccgccgcgcatacgcctgtactacaatgacgaaggcattcgatcgattctgcgccaatgctcaccgactcttgatagccgcgctcgaagacccgcacgccaactccaacgatgcccagatcgctgtcaaggtactgcgctaccgcaaggtcgcttggataatattgatcctcgaggcccgatgttcgacgtctccacgttcttcggtatcgagtggtgcaaaagtgggctataagctggaaagcgtcaaagcggtcataaagtagctcgatggggaaggagaggatataaaaggttggagtacagcgtttaattcgtagtaagcccatcaagttgacgctcgctggggtctggtcgtagcccgttcattggtttcgcgaaatatcagtgaagaccgtcgccaacgtgattaaggagttgatgtccgagagaagcagtctccagagattaggtggtcgtaattcgctgggtttcctacgcgcaatgaagcatattagttgcacgatgtgatccctgatcctcagctactttatgctgctgttctgtagaacatgataggaactgtattatactactagtagtgcgtttgatatggtagctgccttactaggataaggcaactttcgcgatgcatttgcctgccgactccgcactgcttttcctgagtctagaatggaggggtggctgcttgtcccgattgctctcggcagcccggagctgctacatctagcgaagttcctcagtccattaccagagtcatctgagcctcaaaagactcgtttgcaagtgctcgacgagagctcggacggcttcgaaggcgacgaagagtttttcctgaacgaattcttcaagaaggagattgtcgaccctgttagcaggagaccaagccatgtatggagaatgggttcgtgtgggggagcgatgtcgacaggtcaccgggcattgtcatgcccattgcagacgagagtacgaaggccagcgagaaggcatcgactcaagtcacaaaggaccaaggagctggtggcggtgacgcgaaagatgcccagtgcgcagctcctgtttcgagactatcaagcacgctcggtactgatgactgtacacgaagacgcaatgccagggtgtgtcaacttggaattcttccgaggtaaatgccgtcggcacaatcctaagtgcgcgcgtccaggatgtggggactacgtgcggtcaaatggtaaatgcatcaagcatggcggaagggcgaagcgatcaagccagaagtatataaagcgcgccatgcccattgctgacgaaagtaacaagagcaccaagacggcatcgagtgcagcaaagagaaggacgacagtggtggagacgtgaaggatgcgcagtgcgcagctcctgcctcgacggcttcaaaagctacagccgtgatcaaagttgaaaaggttcaaaagcgcaacgggaagatttttaaatgggtcttatgcagaacaggtcttggatttgatcatagcgtactttttctatgatctcgtgattggatcatgttttgacgacaaaagccacttcaccgtagactacgaacgacctcgagctcaccgcagtggctgcaatggcgctggtgggtaccggtatcaccaagttgcgagcagctaggtgatgcggggtcttccagccctggtcgtccaacccgctatggaccgagcctcctctccacccaggctgccagagcgagctgctggacatggagctggaagatgcagcagcaggccgcggcacgccggcgtaaggcgcccgaggctccctcgagctcgtcgcttatcaagtcgccgcttgcacgagacaactcctccgctccaagaagaaggtgggcgtgggtgcgctcgtcgtgtgaagcgcggcacgcccctcgtgatcgtgagccgccgcggcggagctcgtctcgatgctttcgatgtcgcccgagcccgtggatgtccatcctgcagaaggagagtcgcaggtctgtggagctcaccgtgggcaccgcggcgctcaggtcctgctacggcaaatgacacccgtctgaatttcgctgcgcgggcgacgacttcggcgtgtgttgcgccctaggcccgtgttcccgtacgacggtcagaggtggcagctactgcttccccgctcacgagctcttcggacgaagacaaggcgttacgagtcgtagcctacgacgccgtctacggcgacgatagacgcggacaagatgaatggagcatgaggacaccaaggccatgacggcggtcggcccgccctcgcccgccatcgccgcagcattgacctcgagtattccacgacaactacagactcaagttcgcccacgcttcgtgcagctcgacatactgtgctgtccaagctctacgacgaggattcggagtggtggggaagacgcagttcgcctcgttgatgagttgtaggtcaagtctcgccgcactcccaagcggtcagcacgtttttggggcacccgtgcgccactccgcgcacccgctacaagaatgagaaggataattcgtggcacccaagcccgtgactgcgtgataagcttcgccaagcacttctcgtcggttgtcatattcgctacggaggggcaacgcgaggttcgtgcaggcgaattcttcaccctgcagagcgctggcatcgcatgggagcgcgaagcatgtcaagcggcgtgaacactgagggttggctgccatactgctcgaaggcgctcgcaggagcgactagaccgtgctgccttacacggtagcgtataagtcattgctacgtccaatgcatagtttacatatcgaatcgaatacaattgcctcactatataagagagcccatcatgtaaggttaccgtctatgcatcttgctgcgactaccagctcgataaagcagcagaatactgcaaagtgaggtgcaggctttaagaaatgactaaagacgtgattgtaaggcatcggggccttgctactgcataatgtctgctcattcaacgtagaccaccttcacctacaagaagtcctgccattacttggcagggcagaacgttgaacggagcatggagaagaattgtcgtgtcatgttccactgctgtggctgtttcgttcagatctaccgattcggtctcataatcagcatgttcaaatcccagacctgatctgcataagaaccaaaataaaggcaaccctgtcaggctgccggacggaagggcaagtgccacgatcacggtggctgggaatactgttcgctttctggctgtgtcattggtgcggaggagaacggcttttgtgtctggcatggaggcttcaagcaatgcaagacggaaggatgcgacgaaaaagtttgtcttctgggcctctacagctctcacgctcgacatttgctgtgtgccactgaaggatgcgagaaaggaagctattgcgagcgctactgccgtcaacacgcgatcgaaaggggcctgaagccaacgaaggcatgcaaggaaaaaggttgtcgacgagccatctgcagccgcagctactgctacagacattgtatcatgaagaggtttatcaagaccgtccggtcgtagaagttgtggggtactggtaaggacaaaacgccaatatatttgtagttgttattgaagaaaattgcacggacggaggcaccagtctagcacagtcgaagcaaaggccacagtacgcaagcaatgcaccccgaagttggcttcgtaaagaatgtttgggaattgtttccgagaaattgagtaatttaatatatgcaccccataaaaattcctcttgaatccgattcgaactaaaccgttacagaaccgataagggcattgcgcaggagtcggtggatgtttgttcccgttgctaccagcagcgcagggttgctacgcccgaaccagttcctcaaccaggggccacactcacaggcgtggcgtgaacctctagcatctgatccgctagaacgcgcggccacttccgatagagaccacgagtttttcctggacgaattcttcaagaaggagattgtcgaccctgttagcagtgagactgccgagaccaagccatgtatggagaatgggttcgtgtgggggagcgatgtcgacaggtcaccgggcattatcatgcccattgcggacggaagtccgaagaccagcgaagaggaggcatcgactcaggacgcacaagaccaagcagttggcggcaatggcggtgatgtgaaggatgcccggtgcgcagctcctgtttcaagactatcaagcacgctcggcacggatgaccgtacacgaagacgcaatggcaagaagttgtgtcagtatccaaggtgcgtcaacttggcatctttcagaggcaaatgtcgtcgacacaatccttcatgcgcgattccaggctgtgacgggtatgcgttgtcaaatgggggtaaatgcaccaagcatcgtgggagggcgagcggttcaagctcgggggttatacgcgtgacttgtccattgctgacgaaaacagcaagacgacacccagtgatgccatagaggacaaagaaattggcgaacaccatggagacgcgaaggatgcacaccgcgtagctcccgtctcgactgtgatcaaaaccgaaagtggtaaaaggcgcagtgctgtgtgcgagtacccgaaatgttccaggttggcattctccggaggaagatgtcgtgcgcatggccctcgatgcgagtacccaggatgcgggaagcatgtggcgttgaagggaaactgcctcaagcacggaggagggaccaggtgttgcgagccggaatgtgaaaggtgcgccgtgtctgaaggtaaatgcgctgcgcatgctggaagggttaaatgctggtacccaggatgtgtcaacgctggcaagtctgacggcagttgcatggtgcacgccaatgagtctcgatgctctcgtgtcaactgccacaatgctgcggtctcagaaggaaagtgtgctttccatagcaaacccaatgagaagtgctcattcccaggctgctcaacgtacgcaagcataccgtacgctaccaaggcgtctggcacggaggcttcaagccctgcaagattgaggggtgcaacaaaagggtctgcgcgcagcaggcagagacgctggccgacttgggcttcttcctggacgagtttggctccacgcgcgctgtccgcgccaagttgctggagagagtcatcgcgcgcctgggcaatcgttcagcaatttctagccattcgcgctgaacatgaaatatcacaagatgaacccgaaaaagaggcaactggtggtgaaattgtggggaatgctgcaacagtctctaagctgaaaaacgtcgaatatcgaacgacctctttatttttatattgaaacttgaaaattcactgtaaaaatactgtcatacaacaatgatactttaagtaacaagttcggctcaacaacacttggtgccgatgctcccaacagtaaccttgctgggcaacatgtttctcgcagccttcatcgccttgatgtcacttcgggcagcccggttgtttggaggtaacaccaccaccatgccggaaacaatatcccctcatagctccggacagaactatcatgttagtgcaccattgagccttgcagtaacttgaagcttcggtctcacgaacgccagatacggtcagcgggccatcgagatggacaagcagagtcgtcgattctttggccagattgcctccaagcgaatcaggagcacctctgtggaggacgcagaactcgcttgggtctccatttcgttgcacccactgcaggcagccgacggctctgcacgttgtatggccaccaccgtgacgaatatttgaattgcttggaaggttttcgctgcaacttgggtgagagccgatcaaatcgtctttggactcagcttgcggtggtgtttgatacccttcgatttcgttcgcacgcatctcgttcagcttagcctcagaactgtgctcctggcaacaatcttgctgttgccgcttgtggcacccttcaatcttgcacttacgtcggagtggaactgtgccttgttcacgagcatgtctgtagcagtaccccttgcacccagaagcactcaattttccgcaccgtgatggcggcataaatgctttgtgactgctctccgggtgcagccctcaacctggcaaatgtggtaccctccatgactgcagcacaagccgcgagcctgaatttgcttggtgcagcctggataacgacagagcctccatgcaaaggggccccgtacgccaacttccgtcgcattgcgaccttcgcgggcaacatcagcttgcccctcggctggtttcgtgctcctatccagtaccgaaggcattgcgatgccaatctccacattgcgcacagtcagactggccttcatcacctgatccacgatgtcagccacgttggtccacttcgtaaccgcacgggttgtctctggctgtggtgacgccaatacaatcttaactccagtattgatgttggtgctgccaacttcacagttcttgctgccaatatctccaccaattccactttccggctcccgctccgtggccgcatgctgtgtcacttgctcgacatctcccagtcttctcttatttgagtcaacaggaggcccaccacccgcctgttgaatctccaacacccactgcagtgcacgttgcaaggccacaatctcctgcttttgatcctccagcttctcacgaaccgctcgcgtcgacccaaaggcccccagtaagaaactcaagtccaccatgatctcgtccacttcttcagactccttctcgctgctgcgtatggcaaacgctccctctttcgagtcttcttcttgcaagatttggtaatcatggctcacgagacgtcgcaggcgcttgatctcgctctgctgctcgtgcaacttggcgcgcacagcgcgcgtggagccgaactcgtccaggaagaaggccaggtctgcaatgacctcgtcctgctgcgcaggggtcaggtccgaccccaccgccttgacgtccagcatcgtttcaacttgaccagcgtatccttgtctctacagttccctatccgactttgataccgaaaggctttcctggcagtgactgcgacagaagccccgagcagcggcacgcttcttgcatccctccactttgcattcgtagtagcctccgtgagcagcgcacaggccatttcgctggcgctgcttgttgcagttgggttgggtgcagggcaagccaccgccatgccgaaagcagtagcccttcttcggtccatagtttttggcgtggttcgtgcattccggttccttgcacaagttatgcctcgtcgtggttgcgtccgggataagtccgtccttgggctcttgcgtggtgaacacatgccggtgcttgtcacagaactcactcgcgtctccgtcgcgcttcacccacttcatgcagccaatgaccttgcaggtttcgtggtggcctctgggaatccgagccaaattactcgaactcgtaagcttccctggggttggcggcgctcgagcctgacccactttactctcagcgttgtgcctatggcagaagccttggctcacttgagtcttggtgcacccctgcaccttgcacttgtacttggccaaagcacctttgtttcgagcatgagtggcacaaaatcccttgccgccggagacgatgagctttgtgcagtgagggacgtggcacaaactgcctcctccatgtagccggcacagttgacgcgtgatggctttcctatcgcagccgtcttctctgcacgtgtagtagccgccatgacgatagcacagcccgttaacttgaactctcgagctgcatccctcttgagagcatgtatacttgaacttgctcgctggttccttccctgcgctgacgtttgtcttctcgttgttcgtcacggacacgtttttcttcgagatgggctgaatctccttgatctgcttgggcaactcaacagggtcgctggagttattgttatttaaacttctcgcctcggcgcatacctcatttacgcatttgagtgcgttcaagtaggcagtgacgacggaactgttgacaaactcggtgcccaccaacgacgcgatattagtcgcagattgaagactacgaccgccacgctcgtcctttgcacctcgctcttttcgaactggagacagcagcttcagcatgacgtccacttccttttgactcgccttaccgggggcagcactcggcgacgccgccttgtcctcatcacgatggtgagacgcagcatttacagcctcacccgcttttgcatccttgcccctgacagccctcgttcctttagcttctccatcaactcggacgatcccttcctgctgagtccttgattgtgcggaatcttctagtaccggtaccgacctcaaggcactcgccaacttttccatcagatttgacgtcagttgaggggccgaacctggtttcccgcttttccttagctcctggaaccagttcaccgtgcactttaagcccgcgatcagttggctttgactttgtagcctgtcgcgcacggcgcgggtcgagccgaaggttcggaggaaaaagtccacgtttgtcatgatgtcgtctacgtgttccggctcctcctcgcagcgttttgtagcattttccccggactttgtgtgttcgtgatgatgatcttcttcttgttgctgcgcacttgtgtcgctctgactgcccagcagctgccacacctgcttctggagccgctcgatgtcgctctcctgggcttgcaactggtcgcgcacggcgcgcgtggagccgaactcgtccatgaagaagaccaagtccgccatcgtctctctctgctgctccggcgtcaggttggcaccgacagccgtggggtccagcattgttatttcgcgcacaccttccttccagcagcttgttgcgtgactggtgaattttgataggacgggattgttctggctaccatgtctctttatttttatctctaagtttagtctctttatatttatacactattgagaaatggtttttggttccattattttaaaataacggacccaaaatagacctaaagcacaatattcatttctatttcgttcatttcaaatagtattgttttttacataatacaaacgatcatacataagtgagaaatttccgagcggtgttggggagggttgcattgtcgtcatggcggttggaagtgctgcaagttccctgactgcgtccgacgctgccgaagaaaatgaatgttgtgtttttcatgactgaaggatgcgacgaaaaggcttgcttcaaggtcctctgtggcgttcacgctcgaggattgatgtgtcgaatcgaagagtgcaggaacggaaggcgatgcggcgagggggtactgccgtcggcacgccatcgaaaagtctcaaaccagcacagtcatgcaacgctgaaggttgtgcgcgaagcatttcatcggcgtggtctttgctaacaaacattgtgttgaaaaggggtctaccagacttaagatccgctcgtagaagttgacaagcgcagtaaattggcaagtcagaaacacaggataggtaaacacgtgacagctctttgcagttgtcaaaatcaatccttttcacttcacgcaagatttatgatacatagatgttgactacgcagaaagacccgagaatttcgcgtcacgatgatctttttgaggccaaacacacttttgggtagcaactgaaacaatgactctagaggagtgggcgttcctggacgaatggtgtggagcgatgcgagcactgtttacagacacggggagctccgcgacggtatggcagtggggcccagactacaatccagctctccagttcccccgagagacagcgagttgacttcatttgaacgcgcagagcagcttcggacactccgtgagggactcgctctattcgcggcagtggcgtggattgatgcagacgcactggtctcactgctgcagtccaaaggggtatgcgcagttaagagagagatgcgaagacacgcgtttatgatggccgagctgcctgtgttcgttgagatcggagtgactcggaagctgtccaaagacccaagcaaagacttcgcgtgggttgaggacgatctcgtatcgctctgctgccagctggacgagcaaaataccagcgaggcattccaggaggcatgggcaaaaattgaaatgcactctacaaccgagtcgcagtcgttgaggggtctcgcaattccgattcggatcattattggcaaaccggagtactcgaaagctggaggcactgcgtctcagcgagtttggaatgccataaagagcgcattaaaccctgaccaagtccagtgggggtggtttacgccgatcttgagcaggaattccacaatggcgagaagacccaggtccgcatgttacgcctcttacctcatcaactccatcaacgcaatgaacgtgcgtacgcgcgctggctccagtgctgtctttatgaagttggtgacggaaatgagtcgtggagttctcttatcggcactaagtttctgcctcgtgccacgacacgattctcaaatcgcgtgccgcatgatctcaacgttattttgtgagatgacttgcgtggatgatcaacgcggcgcgttcgtgaattttgggtgcgtcacctttcaaaaagagagcggcgtggaaatgaatgcgctttgctcagcgctggtggtgactcgctcctgtcggtcgttcgccttcagcctctgcccggaaggctcggcttcggaagtgaaaacctggatgtggatggcgtacgcatttttctcgagccgagctcgcctgcgctcctctgtgaagcaagttacgatctacaacgctcgtctaagtcgcgtcatactggatacgatatctaggattctaacagccaccaatacggagaaggaactattcactgttgctacggggctggacagcacaagtaacactgctcgtgacacacgcgagtaccatttgaagcagaatgcagtggtgcaagttactgaacaaacaaacggccgtgtggtatcatggaactcggcggatatacttcgacaaggtggagttggcggtgtaaggctggtaaaccccaacgataacggctttagtgagtgggtggacgtgctggaggacagctatgcagtctttggattgattttcctttgcgaggccgacccatcaatacccaaggaatttttgaaacatgtaggagctgacactacgcaatagcaatatctccgctgatgcttttgttcgggcgtgcaagcagtacaatccgccactccgtcgtcttgagtgccacttcgacgatatccgcgttgtcgccgagacatttgagtgatgagtcgagtatgctgacgaataaccttcgctggtggcactgcagtttggagcggttcaggaattttagggcgacatttggggccttgactcgtatgctgagtgagaatacagtgctgcgctacttgacagtggttggggaccgatattatctaccaacgttaaaagctggattgatgcagttccatcttcaggagctcgaaggcaacggagagctgcaggtcgcgtgcaagttggcgttcttgagtgtttttcacgccgatgaagcgcgcccacctttgaagaagcaagcgaaagaccaacccgaacgttttcggctacatgccccagacacgcacgtgatcaccaagatttttgagtttgcggcgaatcatgccattcgaagtgtgagaatcatctcccctagcgatattgaataacgttagcatgaaggggattgtgctacattatgagaactggcattaaattccttgcttaatgttttgagaacatggcactcttattggaatcgatgtgaattagcaaagtgaggattcgacaccttgcaccgcacttgacttcgtccgaacgcctacaaactcgcttgtagcccattcggaagaacggcatagtgacaacaacatttccccaacgtactacacttgcgtgtaataatcctggtggaccactggatcaggaatcggtaggtacgtgcaccaccgaatcgcttgtttgaatgttgaactcgagagcttatatcggtatcacggaagatgaactctgtccattgctcgccgccgtctcatattcgcgttagtgtgcgtagcagtagccgcggctgtgcttgcgcttggtacatccgtccaccttgcactcgtaatagcctccatgggcaccgcatagaccttttacaagtcgcgccctggtgcatccaggttcgctgcaggtttgtccacctccgtgccgaaagcagcagcccttcttctctccatcaaacctccccaactttgtgcatcctggttccttgcagaggttgcgttttcgtttaccgctcgctcgccccgacactccaagctcgatgacatctacctgcgtggggtgcgttgaaaaagctgcgggtggtggtgcagactgttcagaagcaggcctttggccaacctgcaatatctccgtctgaactggcgttcgaaccactttgccctttgcctccgcaggtggtaccaatgccacgtcgttgtcggttctctgctttcgttggcaccagtccaatgtccgtcgcaatcctactatcttcagcttctggatccgcaacttgtcgcgcactgctcgcgtggagccgaaggttcgaaggaagaattccacgtttgtcatggtctcatggacaccttctgcaccatttccgttgtgatggtccgtgctgtcaaattcgccctcttcttggtgcgaactcgcattttgttgagggtttggcagataattcacatggcgctcgagacgtttgatgtctacctcctgcttctcaactcgagacgaacagcggacgtggagccgaactcgtccagaaagaaggaaagatcctccataacttcatcctgttgcgctggtgtcaggtcggcaccaaccgctttgacgttcaccatgtgaacttccgacgcgaccgacaagcgaaatccacgtgtgaagcgggaatcatctcgcgtctattatgatcgtgttggggataaggacgacagtaaattatctaggtaaggttcacgcagtgcccaaagcattttagtgctatttatgacacacttctcgtcttgttccattcctgcttttgcgcaacataatagttataatctgtcctccagcagggcgggaattcgataccctcttcgactgtactattccaacggctcaaaaatctggaggaggcggtgcggtggacataaccctttggtgtatgaacgtctgcagcatccatcgattttgcactctcggtatcctccatgggcaatgcagaggcccttcagcacccgctttttgttgcaatccggcaccgtgcaccttggccccccaccatggggaaagcagcaacctggcttaggaccaccgtatctcgcccttttcgtacaccctggctccttgcatacacggcgtttcccctccacccgcgaggtcctgttctcctgctcttgatcgcggattccactgccagccacggccagctcatcaacgtcgccaactctgcacttcgtggacgcaggtttcttcgctactccctcgttcgagtctttgggttggctttcacgtcgcttcataccttcagtaagcttaccatcgtctacccacggttcagcagggtcgtcacctccatcattatcgtcgtcgtcgtcgtccagaacaataaccacttgatcattgtcatcatcattttcacggctcaccgccaattgacgcccagacagagcaggatcggtccccaggtactccacgtcgcttgatccagcactatcactatcgtcatcttcccctctgcgatcttggaaccattgcacggtgcgtcgcagccccacgaccttccgttcttgattttcaagtttttcacgcaccgctcgagtggatccgaaaattcttaaaaagaagtccaagtccgccatagtgtcgtctacactctcctctgaaaattcataattgcctggcgactggttctcgctatctgtcgtcttgccctcctcctggggagaaggcaagccacggttccgatccatgaggagatatcgcacttgcgtctcgaggatcccgatctcccgctgctgctcctgtaacttgatacgggcggcgcgcgtggacccgaactcgtccaggaagaaactcagatccgtcatcgtctcgtcccgctgcgcaggcgtcagcccgacgcccaccgccgtgacgtccatggccaggtgagctgggaagtccctgcaagaagttgactagcaactgtcaaattgtatacaaacgatacgcaacataccttcaataccttatacagcagacaatcttcaacttgcacccccagtgtatcaagcctgcgccttacctttatctttttgttcatcctggtatctcccagccttgtattcatcgaatcacttcgcagtctttttggcgttctcaatctgtgcttggctcaacagcttttcaactgaccaaggcgggataaagttcttctcttgacggctgtgaaacgttcgctcgaggtcacggtcacggttattgctgtaaacacgctcgcgaccacggcttcccagtcaagagcggctggatatgcaacattgacggttgtggaaagtttgctaagcttagtgccaatgggcacgggtattgctgtaggcacgctcgggagaagggcattgccgttataaatgctaagaagtgtcgtgctgacggctgtgaagcgttcgcccgaggtcgcgctgcaggttactgctgcagacacgcaaggaagcatggtatcatcgttagtcctggcaagaaatgtagtcttgacggctgtgaaaagttcatgcgaagggttattgccgaagacacgctcgagagaacggcatcgtcgttagaggtgacaagccgtgccgcgttgaagactgtaaattgcttgcggttggtaatggtcgtgggtattgccgcagacacgcaagggagaatggtatcgtggttgtaataattggcaagcggtgtagcatcgacggctgtgaaaaatttgcggtcgcccatggacaaggctattgccgtcgacatgctcgagagaacgtcattagcttcacggacgagaagtgcagcgttgaagactgtaaaaacttggcggtggtacgctacagaacgagaaatcgtgaccagatgcgggttcgaggggtgccagaatcttcacagaggtcaggggtactgcgaagaccaccagtctcacgaggtcaagccgacttgatgcatgcaaggaagcatcaccactaccagctccatcttcagagcgagtagatacctcctccagccaacccggttcaaacaccaagacgataaagcgtcgaggtccccacgtaacctgcagagccgttggctgcatgaagtgggtgaagcgcaacggagacctgagcgaaatctgtgtcaagcaccgacaaacaacgacattgcatgagcccgctggtgtgtctgtcatccagaatgagaacgggcctgtctccaaagtagcgaggggtggtcgtggtttgtgccaggagccaaactgcaccaagtttgcgaaaaatgacgggccgaagaagggctactgcttccgacatggcggtggggtgacctgcagccaaccaggctgtaccaagcaacgccagcgacacggtctgtgcgcggctactacgaatgcaaagtggacggatgcaagaagcgatcaatcttgagcggatgttgtcacgtgcacttcaatgaactcaagtcaacttcaaatggtggagtgccagtcgagcagcaataaagataacgcaagaaacagcaccttgtggagatatttccagtcgtctgaccatatttcagaatcttgctttcgagtacaacaggcacgacccttacgaaatgctagatgtgacgtcggttggctccgatctgacacctgcacagctggaggagacgctgagcgacctggccttcttcctggacaccttcggctccacgcgtgccgtccgcgccaagctgcgagcgcaggaaagcgacatcaagcgcctcgaccggaaagtgctcctcccgcgcgacaaaaacttgcatcaatcggaagaagaagaaaaagaagaagaacgagaagaacgagaagaacagcaaagagaaggacaagcacaagaaggcgtcgacgagacgatggtcgacgtggacttcttcctgcgcaccttcggctccactcgagcggttcgagagaaactggaagctcagagccagaggatcgtggggttgcagcacaccgccaagtggcttcaagagcgttggaagccgaccgaggagagctgcgatgactctcgtgatgtggagtacttgggcacggggccggcgtcaaaggctgatataacagagagcggcatttctcaagacgaagatgaagatgtcgacgggacggacaacggagacggcagcgagcatgaagagcctggagatgatggcgacgttgtgatgacttcacgtgggcggaatgcagaagataagaaggcggaaggagccgacgtggagccaacagagatgcagcgcaaagtgatggccccgagagaagatgaatgtggtgcttctagtgccagcagtgttgctgacgagagcgactccacccctcacagcggatgtcggtcggtaaagtcggcgttctctgtggagttcccgactgtgtgaaatatgccaagctaaagcacttgtgcgtcgctcacggcggcttccgcccgtgtgaggtccatggctgcaacaagaaagtcgcctcgcagaaccgttgcttcaagcatggtgggggtaccaagtgcaagatcgatggttgtaacaagatcgcacaatctagtggcaaaggacattgcaccagacatgctcgcgaatacggagtgttgcccaagctcatctgcaaagtgccggggtgcagcgactttcgagtgagcaatttttattgccgcgagcacagtcggtctgataaggacaagcaagaatcacagaagcgagcgcaatcgttcggtggaggggggggggggccatttccgcaactcgcagccacgccacgtgcagagccctaggatgcatgaagtgggtcaagcgaaacggggatgacagtgagtactgcgtccaccacagatgtccttcagcatcgcgtgacgacagtcccagggactccaacagcaaccaagacgagcaaggcgacatcaagcccaaagaccaaggtaacaacggacgccccgccccacctgcaaacaacctggatgtctgaaggtcgggaaaaactacggagtcaagaaaggtttctgcttcgagcacggcggtgggtttacttgccgtcagcctggttgtaacaaggaacgcgcgctaaaggggctgtgtgctgctcatggcggcttccacgtgtgcaagacagcaggatgcggcaagcgtgcgtttgtgagaggctactgttaccaacacagtagtgttgagcaatcggacagtaggtattcgaacggggtgttgaccagtggttaatagagtaagttgaagtttcccctacagaagagaagaaggccgccagatcggatttttcagtagaaagcacgcgtgatccacgagatccggcaactcattcaaccaacacgatgctggacgtcaagacggtgggcgctgagttgacgcccgcgcagcgagatgaaaccatggacgaccttcatttcttcctcgacgagttcggctcgactggagctgttcgtgctgcactgcaagagcaagagagcagcatccggggcctcaaggagcaagtgcaacgtcttttgaccccgacaggcgaggggttgcagagtgaagaggaggaggaagttgccgcggcggtggaagatggtgacgaggaaattggggggaatggcgttgacgagatcatggtagacgtggatttcttcttgagaaccttcggctccacgcgtgcggcgcgtgacaagttgtggcaacagaagcgggagattgtgggcttgaagcggacggtgcagtggctggaagagcggcgtagagagcggcagcagagcgatgactcgagtgatgtggaatacttgaccaagccagcaacgcgttcgatgcggggagagaagctagagatggaaccgcaaggtggcccttgcatcatgaactggagtcgtgaggtcgatgagatcgtgggctcgagcgacgaaagtgatggcagcagcatggagattgaagacgctggcgtagagatggagatggtcagaggcattggggacggtggcatcattgagaaggctgaggctgtggtcatcgcttcctccgagcacgagtggcaagacgaggactttgaagatggaacttgtctcttgtcagactgcaccaacacggctcaagcgaacggcttctgctacgctcacggcggatatcaggtgtgctatgctcttggttgtaaccggagggctgctgtacgagcttttcatcgcaaacgcgccgtatccagcgacacgaatgatctgcacactgctgaatacgacggtaatggaaagagcgcgaagaaccaaaaggtgtgggtccaactcgactactgcgataagcacttggatgaagaggaactggatggagatcacgcagccgaagcatcgagtcaagcgcagccgcatgagaccatccgcgctaccgatcgtcgttatcgtcgccacagcgtgtgcaagtggcttgggtgtatgaagtgggtgatgagagatggagacccgagcgagtactgcgtccttcaccgagcccaagacggcagctcagtgatctcgagaggaagtagcgtggcatcattcacccactccgaggacgagtcgagtgttgagcaagtggaggccacggaattcaatggcgaaaaggacgtccagcgcgactacaaaagccccgtcctctgcaaagaaccaggatgcagcaagcagggatatgtctacggagacaagaggggctactgcttttaacacggcggtggcgtcacctgcatcgtaccaggatgccccaagcagcgtcaattgaaggggctatgccgagcccacggaggttaccacaagtgcggcgtggaaggctgcccgaacccggccaaggcttctcgacgctactgctcactccacatcctggagagcagcagcacctcagaaagcaggtccgccacgcctaaatgagttgccaagccgcactcgagttctctaggtaaaaggcaacaagttggagttgaaagactaaaacgtttttgctcgatgtgaagtccgtgggctcggagctgacgcccacgcagcaggacgaagtcctggaggacctgggcttcttcctggacaacttcggctcaacgtatgcggtccgtgtcacgttgcagcgccgagcaaagaagaagaagacggcgacttctgcttaccggacgatgaacaggctggagacgatgtggagtccacatccacattgtggacagaacgatggctgacttggacttcttcctccgaaccttcgagtcgactcgagctgtgcgtgagaagttgcagagccagagacgcgaggttgtgggcctgcaacgagcattgcaatggctccaggagcggcgagggacgatgaacgagagcagcgggccaagtgaggtggggtatttatgcactgtgcgagaggcgacaccaacagagggggaaatctcgagtcgagagatcagagccagaacaatattcaagagctgcaggtggaggaaatcgactgcaagaagcgtaactgtggcgaaaaaatgggagtaagtggctcaagcgagccccacgagcatcaatcgacgctgccgtggcaccgagcacgccccaatcgaaaagaaccatcgaattttcgtgacgacggagagtagatcgacagacgcaaagacaacaagagcggcgagtgatcatcaaagacggctgtggtttggaacacgaagttgtttttgctgaacggagcgttgaaggcagcgatgatgagaagcgagtaaagcattgcaatgtgcaagtgagctgtgataattcctatcgccgaaactaaagctgacgacgagattcaggaagagctcaagtcaccgaagaacactgatgaggattcagccgtaggagtcgagccgattgaaggtgctgagtaccgtagcgctgcggcgggtagatctccactcaaacgcaagaccgggaccctaattgccaaaacggcccccaagtaaagggtttgtgttgccgtcacggcagctaccgcatgtgcaaggctgatggttgcgaccaaagggcggtgtcctggtatcggtgctttcgtcacggtcctaccatggtctccaagctgctgaactcgatcagggtgacagatccaacaacattgagatggagcagcaaagtgaagctccattggtaagcgttctaggcacacaacatgccaagccaaggattgcatgaagtggggaatgcggaatggagacagcagatactgcagcgatcatcaagacaaggcactgcagagtgacgattctacaccaaaaggcgtatcaaccgagtcggagcagtcgaagtctattgagcctgctaagccgatgaaactctacgataaatgctctcagtgcaagcaacctggctgcaagaagcgagcccgaaaagtactgccgcaggcatcgtcacgagtgaagccacgattgaacgcagacatgctggtctttcaaagaaaatggattcgtattcatacctaatatattattatacaggctcacgacacaacaactaatgttaccaaccctcttgaacgctactgggacgacacatacttggctcacgaagcttacggcagcatcggttgctgggggtccgcgtggttggtgagcagatccactgccacctcaaacgttgtgagatagtagccgagctcgccagtgatgtcttgagggtcgcacatcacccgcagaaactcgcgcgtgatcaacagctgcgacatattgctcgtgaccagcgcgaacaagtgcaccgaaatgaactcgtccgtggtcatcgaaggccgcagcaccatgtccagctcctcaacggaagtgaggctgctagtcgttccaacggatgacggagaacgggacgacccacacgtctggaaaatagcccccgcagcacgagccaggcacttgagtttgtcgagcggcagcgcgtagtcgttcacgcggcgaagctcgcgacgagcatcctcccaatcgcttcccgatccggccacaatgtgcggcggcacgccgaaaaaggactgaggcttggtctgaagcaccttgatcttgtttttcaaagctccttcgtcgtcacagtccgtaagcgtgtgcagcgcttcgtgaacatggtcctccaggggcacaagcacgcgcttctgcacaaatccacacactgcgtgcttgatctcgtccaagaactcgtcgtagtccggctctgtgcgctccgagcgggccactgcaagctgactaagcagcacctcgtccctgagcatcacgtccttgatctcacccatcttcctcgacacggtgttcagcaacgtccgcgccttacgctccggcatgaccacgtgcttgtcgtcaacactcatgcgcacgagtgcagccacaaacgactcgcatgcacgcgcgaccttgtggctaggcgccgcgaaaatctccgccaccaagtgcgacgcgttcacttggttcttgagcaggaaacatctgcaaccaccgcgatcaaagacgtcacaatggcggtgcacgcccacgaactcctgcagaagcagcacggccttcctccggcgtggtccaaggggcgcaggcgccacgagcgccgccgtctgcctcaagaacgagtcaaacaccacgcgtctctgcgtgttcagcgagcctcggaagtggaagaatttcttgggcagtcggaacctcctcaggcctctgaacgtgccccacagcgctctcttgacgggtgcgtcggccaagctgatctgctggatctgcgagtagaactgcatcatctccttgagcgtcttcctgacctcccagcgcttctgcgtctccgcgtccgacaccttgagcacaaacaggtcgtggccctccacgttctccacccgcacgacgcgcaccaccacggcgtagcggatgtgcaggtccaggtactctctcgacgcgcagtgcgggtcaaaggcctcctgcctggccgtctcctcctcatccagcgaggagccgcggctcacgcggccgcagtgacacaggcgcatggccgaggccgacgccgtgcgcggcagcgccttgccggcggtgcagcgctgctggtggtcctgattctgattctggtcctgggccggcccgaaggcggcgatgagcgcgtccgcgccgtcgtcgtcgtctgcgtccgtggcgtcctcgtcgctgtcctccacgtcgctgaggcagcagagcggctcggcctcgggctcggccgcggcggggtcctgcagctccacgtcctggtcgagcgtgggcgcgcgccggcgcttgcggccctgggacgccgagagctgctccacgaggcacttgccgcccatgagccggtccacggccgcgggctccagcgacagctcggcgaagtcctcgtcgcgcagcagctcgttctccagcggcggcggactcgaagccgccatgttcaacacgccaagaatgaatgtggcagcagcgcggccaattctttagtgagcccggcgatggtcccatctgaagagcagaaaagcagttgcggtagaagtaccgttgcgcgtcaattttgtagaattatgataaagttttaccgtgtcgtttagagcttttgctcatttaacatgtgacgcgttatacaaggttatgtgaaagtgcaggaatgaacaaaacgttttggcgggtactgtaccgctgcataaggatttgagatttgagatgccaccacgccaaaccaagaagatgtggactgatcatgggcattgccgcgctcgcggcgcagctcccgccgtgttctccacgcagaggcccacctggccggtcaagcgccgcctgctgcacgccatgcggcgctcggcagttgcttgcagcgtgcgccgtgctctgacgcgcggcgcaccgccaagtctatctagcgaaacctgaattttcggccaaacagacggaagagcaacttccgacatccggaacggagcaccgaattaattggcagggcaccgacgccaaaccaagcagcgtgcgactcgctcgcttgcttgcttgaagccgcagcagcaccaccagtgttacagcctcgctcaccattgacttcaagaaggtctcgtcaagcgaagatgttagggcttcttcttggtgagcctcatcacctttcggaccgcaagttcctccccaggccaatggcccggtttcagtgtatcagttgctgcgcaagcaccaggcgcgagtcgctcgcccggctctcaagtgccatcgctggcgtgcgtccgaaggagatcgactcgacggtctccgataagaaggtcgtggataccaggcgggtcaggacacctagcctgtcatgaccaagcacccgccagagctctcagatacctactctagtaccatgcagcagcagtacctagatgaccagctccatctcgactcgaccttgcaaacacgcgccgaccggcaggcatatcttggcccgtcttgagttgaggctgttggacacgctcaagctccagcattttacacgaatctctctaggcagcgtcgcgacgtcgcgcactgcaacttgtggcgcggcaacgttgcgagccgctcaagtcccaatcccgcggagtggggagtggcaccgccatcgtcatggtgacgccttgacttgcgcttggtacaggtacactacatttgcgtggtccacacctctttttgcccgagctaacgagcgccttatcgaaagccggtccccgccgaggaggaggagcaggacgaggagatcatgacgtccatggccaacggggtggtcaagctgggggagctgccggcgctggaggacgtgcccccgagcgagcgcatgcggctgttccgccagaagctcaagctctgctgcgcgctctacgacttcagcgacatgcgcaagcaggtgcgcgagaaggaggccaagcgcaacgcgctgctgcagatcgtcgagtacatctcggccgggaaggtggcctgggacccctcggtggtggccgacctgctcgagtgcgtgggcgccaacatcttccgccacttggggcgcagctccaaccccacgacggtcaacgccaacgggaacgtcgaaggtgagggaggatatccccccactctgctctaccttcctctctcttgccccccccctaatgtattggtggtgtttatctattgcagccgcgccggaggatgacgagccgatgctggagccctcgtggccgcacatgcagttggtgtacgagatcctgctgcgcttcgtgctgtcgaaggaggtggactcgaggacggccaaggagtacttcagcaagaagttcatgattaagctgctgaatctgttcgactcggaggaccccagggagagggactacctgaaggtccgggagtgtctggtcatggctcaaagaggggagtcgtggatcgctcactgactggattcgtgaattgttgctcggatacttttattcggtgtatgttgcagacgattctgcaccgcatttacggcaagtcgatggcgctgcgttccttcatccgccgctccatgaacgacatgttctacacgtttgtgtacgaaacggaatcacttcaaggcgtgggcgagctgttggaaatcttgggaaggtgcgtttgcgtagatgcccgttgggttgcgttacgctgagttaggccgtgatgggcagtggctcaccccttgcgtcttgaccatgcagtattatcaatggttttgcactaccgctcaagccggagcaccaacacttcctggagcgcgcgctgatcccgcttcacacggtgcgttctctttatttctccacgtaatgagcaaacagggtatccgatagatctaagatatctaactaaccgctgctatcgtcgtgtgatctggcgagtaggcaggaaatctagccatgtttcaccagcaactggcttactgcaccacgcagttcgtggagaaggaccctcagaccgcggagccgatcattagggggctgctcaagtactggccggttactgctagcgccaaagaggtattgcattgtctggatgcctgtcaagcgggttattcgggtcttgtcactcatgcgtgtttctgttctactgtagatcctgttcctgaatgagctcgaggagatcatcgaaatgatccagatggagcagttcgcggcagtaatgcggccgctcttcctgcggatatcgcaggctgtgtgcagcagccacttccaggtctctcagcgcgccttatatttatggaataacgaggctctggtgcggctcgtgagtgcacggcgggccgagatcctgccgctgatcttcggcgcgctgtaccgcaactgcgagaaccactggcacagcaccgtgcagacgttgacgtacaacgtgctcaagctcttcatggaaatggactcgcagctcttcgaccagtgctcagcgcagttcgaggagcgcgaaggaaggtgagtcagcattcatgcatgcaacgtctgcgcagccctgctcttgcacgggctcactctcgtttaacaaaatccccgatctgcatcgctaacggtatttatgtgtttatgtgtccttcctgactacagagcgcagcagacgacggagcagcgccagttcaagtgggcagccttagaacaccgcttgcaggcgcagggaccaatgtgacagaagcgcacgaagtccgttgctgccgccaccgaacgatgacaactacaaataacgcgatacagccacgccatcacatcacacccgactgcggagggcggcggcgcgagcagtgcggcgagtcaggcgtctgtccgatctgcaaacggttggtatattcattttatcggctcgagtagataggcaggcatgacggacgcgccagtgcaagccgctcgctctcgccccatcgcccgccgcttttgtcttgtgcgcgcgccgcgttttgcatgtttctctatctcttgccttttttgcattgcgcttcgaggtgcccacataacgtatcaacgcctcgacccgctcgtatcaatagcttttcattgtgaaggaagttatccaagtgtttcaaccatcgcagtgcatggcatggagctccaggacatcagcgcaagtgtcgtacggcttgaagttgccgcaatagctacgggtaatcgaagggagcaccacactggacacctaatgacgccatacatcgatggaacgtctggaattgccaccgtcgtgcacctttgctcagactgctcagtctggaattccccgactaggaggcagatcgatcgaacgactggcgagtgccatgacacccccacagcgtgttgcggaacgtgacttcctcgccaacatcactgcggaacacgcttcgtaatgcgagggtcgcagcgagcccctacagactgggtctaatagccgagcgtgttcgccgtatgcatggcaatcgtgttcccaactatgcgctcaggtttgacgctgctgacagtgcctccgcgtttgaggtgggcaccgaagctgagaccgttgtcagcagtgcccttcgagtggatgttgagccagggaatcaggatcccaacactgctgatgtcgctgatgctggcaatggaggctacaaccaccaggtacctcacagcgatcgcggcattccgtcggaggtcgcttcagcggatcagtgcgagacggacgtcattcagctgctaacgaggatacgcgcagacattgaagcttcgacggcgatgccgctggagatgaccccaccattcgtgccactgaggaacaccaacggcaggagcaacaacagtaagcagcagcacagcaatggccgcgtcgacgcaaggccatgccggttgtggcatcgagctgcagcacgacgtcattgctccccccctcgcgggcatttccagccgcacacgtcacaggcgcggccgcgttggttgaaggcacgcccgtatccgttaaggcccgttaagcgtctaattaaccctatcgaacgggttcagcccgcgaaacccgcgtagaattacccaatcagcgatttttaactcggcgctgtttttggcggtcctttcaccccctccgtcagcatacaaaacccaagtaaattggcttgtgtggtcctcattggctccccccggggcggatcgcccccccggtgtgcggctgagggctctttggttcatttccgctttcggccgcagacgacctaaggaagaaaagatgctgtctcgtgtggtgcgcgccggtgcgcgctcgttcgcgaccgacgccaagaaggcctcgggctcggtgggccagatcacgcagatcattggtgccgtcgtggatgtccagttcaaggacaacctgccccccatcctgaacgccctggagatcaagacccaggacaacacgcgcatcgtgctcgaggtcgcccagcacctgggtgagaacacggtccgcaccatcgccatggagggcacggacggtctcgtccgcggccaggagtgcgtcgacacgggcaaccccatcatggtacgtttcaaattttcagatacctcttcagatttttgtttagcacaagtctagatcaaagttatttatatatttattctgtattttttttcttatttggaacgcggttttaggtccccgtgggtcccgagacgctcggccgtatcatgaacgtgatcggcgagtccgtggacgagcgcggccccatcaacgccaagcgttacgcgcccatccacacgtcggccccgctgctgacggagcagggctctggcgccgagatcctggtgacgggcatgaaggtcgtggacctgctggccccgtacgccaagggtggcaagatcggtctcttcggcggtgccggtgtcggcaagacggtcgtcatcatggagctcattaacaacgtggccaacaaccacggtggtgtgtcggtgttcgccggcgtgggcgagcgcacccgtgagggtaacgacctgtactacgagatgatcgagtcgggtgtgatcaagatcaacgaggacggcacgaccaccggctccaaggccgccctggtgtacggccagatgaacgagccccctggagcccgtgcccgcgtcggcctgaccggtctgaccgtcgccgagtacttccgtgacgtcgagggccaggacgtgctgctgttcgtcgacaacattttccgcttcacgcaggcgtgctcggaggtgtcggctctgctgggccgtatcccgtccgctgtgggttaccagccgacgctggccacggacctgggtgctctgcaggagcgtattacctcgaccaagaagggctccattacctcggtgcaggccatttacgtgcccgccgatgacctgacggacccggccccggccaccacgttctcccacctggacgccacgaccgtgctgtcgcgtcagatttccgagctcggtatctacccggccgtggaccccctcgactccaagtcgcgtatgctcgacccccgcattatcggccaggagcactacgacgtggcccgtgccacccagaagctgctgcaggactacaagggtctgcaggacattatcgccattctgggtatggacgagctgtcggaggacgacaagctcaccgtggctcgcgcccgtaaggtgcagaagttcatgtcgcagccgctgcacgtggctgaggtgttcacgggcaaggccggcaagttcgtgccgctcgtcgacacgatctcgtcgttcaaggacatcatcgccggcaactacgacgaccttccggaggccgccttctacatggtcggtggcatcgaggaggtgaaggcgaaggctgctgagctggcggccgagctcgacgaataagttactcggttcgatatgcagagcggaaaagcaacccaactccttccagcggaagaaagcggcgtctagtgtgcggcacgtgagaccggaaattgaaaaagcaacaaagtactcgagcaggcctctgcggtttgtaattggactagctttctttgtatctgctgcttctcatttcatttcgacgtgatgtgtacgagctccaaccttctcccataaagcaatgaaaaacataactcaaacactcctgtcgttcgttgttcattcattccgccatgaagctacagctacgctacgtcaaaacgttcaagagtgcgtggcgacttgttcattcaccgctcgacacgtgtggtcgaggcggatcgtcggacccaaggtggtggtttctggcacaaagtcgtgttgccgtggtcttgagtcctcacactcttctgataatctactgtggcttgtcggcacttgtcgagacgcagaagtgcacatggacagcagcaggtgtattgcttcagttcatagtggaccgatcacctaccttttccagcggtgtgcacagaacgagcctagcctacagtacagtcatcattgagagaccccgaacgcacgcgtcttttgctgtttctcgatttatgacgatcacgaattgcggcgcaacacagaggacagtccttgggcagctacaccacgccacgccacgctcctctcttctattttctaatcatattcgaagtcctcatcgaagtcctcgtcgtcgtcatcgtcgtccacaatctcgtcgtcgtcctcgagctccgcggccgcgatgatttcttcgtcgatagccttccactgctcgggcgtgggctccgggtaccgggacaggtacggcagcaatgccagctgacgcgagatcttgatggcctgagccaccttgcgctgctgcttggccgtgaggcctgtgaaccggcgcgggcggatgcggcccgtgggggagatgaacagccgcagcaggtccacgtccagcgccagctccacgacgtccgggtggttagcggccacgaagtacttccacggcttggtcttgtccttccggaagggcttcctcttctcggcaggcagcatccagttgagcatctcgggcgagacggcgtagccctgctgccagtgctggaacgggtcggccacgtcctcgtccgcgttcacgccgatctgactctccgcgaggctcagggacgcgtcgtagcccggcatctccacgtacaggcggtcgtcctccacgtcgcccgtgtagctgcctagggccacgccctcctcgtcgtcgtactcgccgtcctgcgcctcctggtcccactcggccacctcgcgctcgaacttcttggcccactcggcggggctcagctcggcgtcctcatcgccgtcctcgtcatcgtcgtcgtcgtcgaactcctcggcgaacttgaggtcgctctcgtcgagctgctgactcaggtacttgaccgcgtccggcagctccgtcaggtcctcgtcgtcctccaccttgtcgaacgtcgacttcttcttgaaatctagaatataatacagtagcaacaaaggttagcactggtttatctggttatgcactagtggtaaacctgttgcgttgcgttgcaacaggttaacactagcctaaaaggtttgtgactttggatacgcacccttcttgccgtcgtccttgcccttggtggccatcgagcggacgccgccaatcacagacagcgcatcgttgtgcacggccaatgagcgcgggagctgcgcacgcagcacggcggacttggcgccaggaccggcacgacgacccagcgctaatgcattgatacgcacgtttagagagagatcgggttagggagttcagcactagcctaaaatttagcaccacttaaccgccgcaacacgcaccagcgatcgcagacgcgcagggacgaagccacacgcgcaccatcttgacgtctctcggatgctcctccaccgctcgctgctcgggggtttgcttctgtggttgacagcggagctgttcgcctatctcgtgtggacccctccacgaacgcgtccattggataaaaatatggtgttgcaagtctgtgtacactacataaaatacacacaaaatgcacacatccaagttgaagttggttcataataaaccagtacactagcggccacagcgaatgaaaaagtaacttcagtcctcctggctcgcactcgtgcgtccgcaaaccaggtcgtccgtcatctaaatgcaatcgccgttcatgaaaacctatctgcctgcctgccacctcctctctctcatgtgctgctgtttctcccgcgctctgcgcgaggagtgttgtgacaggatcgtcgcaagcagaggacagagctacacagtcgccgccgcgccggatccgccagactttgcagcgcgagcgtcatccggccacagcagtaacaatggagccctcgcctcctcttggtcgtcgtcccctctcctccttccccctactgcgatcttcgctctaccccatctccgcccgcttggtccaactcgttatcattcgctgctatagtgtccgcaggcaagctcgtgcaaggcgctcgccgcgatctgctctgcaaaaagacgcaacttaggccgttgacgatggagccttcgatgctgccatcgactctattttccgccacttctcctgctctttgtccttcacgtcggccatcgcttgctccttcagcgagtactcctttgcacactggtcataaagcgccatgtcgtagtccatgtagagcttcagcacgttctgggcgaggccttcgactgtcgtgttccagtgtcccagcgagtttctatggagggggccgtaaatgaccggcaggatcaggtgcgcgtgctgcttgctcaagcatccgttgttcaccaggtgctcgttgttccacaggaacagcgaccgctccgagacctggaagtgctggctgccgagccacttggccaggccgttgaagagtggcttgtgcacctgctgcagctgctcgctgcccataagctccaggatctcctccagctcgttcaggaagatcacctgcttggacgagcacgaccacggccagaacttgatgatgccctggataatgggcactgctgtctccgggtccttttctacgtactgcgtgatgcaataggaaagctgctggtggtacattgatacgcacttgggcttgtgcagcggcacgagcgcgcgcacgaggaactgcaggtgctcggccttgagcggcatggcgaagccgttgatgatactgcccaggatctccagcagctcgccgatgccgttgtgccgctccgtctcgtacacgaaccggtagaagacgttgctgatggccttgcggatgaaggaccggtgcgacataaacttgccgtagatgcggtgcaggatggtcttgaggtaatcccgctcgcgcgggtcctcgctgtcgaacaggtcgatgaccgccaggcagaacttctggtccacgtacttcttggccaccttggcgttcacctcgcccgacacgatgaagcgcaggaaaaattcatacaccacttgaagatgtggccacgaggcttccagcacgggctcgtcctcctccgggtcaaagtcctccgtctgcgggggcagcgcgcggcaaatgttgaccgacaccatcgacatgatgtcgggcatgagcgtctccgtgaagatcttctggcctccggggttgttcacgtaatctaccagctccagcagcgtctggcgcttcaggtccttgcccctgcaaaataagacccggttagataaaaccgagtttctggataagtaaaacccaaaaatctgtctctaaaggcagaataaaactcaccgcttgtccgaggtggggtcgtcgaaattgaagatgaccgagcagagctcgagcttctgctggaacagcgcctctcgccgctgcagcgacgtgtccttgaggtgcggcaggtccttgagcgcctggatcttctggttgcgcgccatgaacgagcggcggcgctcgcgcttgggcagcgacacgtccgagcgcgccacttcgcccacgggcgagccggcgccaacgcccttggccgcgccgtccacgtccatccgatcgggggagttggcgcccaggtgctctccgttgttgctaagcttccgtttcaccgtttgcagcatccccttcatcgcttagttaccccgccagcgtgtcttctagtccgatggggggggaactctctcactcacccacccagttgaggattttcaaaacccaaatcaggtcgtttccgcactgtaaatgagagagaggaaaaagtgagtgagtgatgaatggcaacttggcaacaccaggttagccactttttgccacgccagacttttagcaccacttaaagcgacagggtgggtaaagatggcggggcgagtcaaacctaaccgaccggcaaaagaggcccgacggaggtgcaaccgacgaagacaacacacgcgcgcgtacgtacgctgagagatggagctgctggccgccggtgactgcgcgggggggctggctggctacttgcgactgcgtgctgctggtggccgtccgctggcttcccttgcgagtctctcagtcgcgttttctttccttccttttcctcccccctttcgccctccacgcacacccagtttacttcatataaccaaatacccttggataaacgatattataccatcccttttacaatcggttatcacctatcaaaaccaatcgccttgataatatgttacattaagtatctatctatatgaaaaccgctacagtacgactgccggctggccgattggcactatacaaaactcaagtggtttgtgtagcggataggggatcctcacgccacctggttgaggcaggaaatagcaatcgcatgggcgatttagacgccgatttacgcccatggagcgcgagctctcgcggcgctgccgacgctgcgtgcgcgtggccgagttcgtgacggtgggcgccgcagcgtccagcagctcaagcaccgtccggactggcaatggtagcggcgccgcgagcgcagagggcgacaggacgccgttgttcgccggctacgtggaggttctgcacgcgcgcaacgcttggctggcagtgcgcgtggacatctggacgatcagagacacttgcttccgccaaggtgcaaatgcaaatgcaaatgcaaatggcagtaatctcggcaacgcaactttaattaatcagattatgatacaatatttggcagtgaaggcggggggtgcgtatcttcacgagtctctaaacgatgttgcattggaggcgccgagtgaagaggcaatggaaaagttgcagcaagtcaagccacttgggataaaggtttcctctaggggggatgagctgccggcgttgacaggcgacgagttgactgcaacactggaagaagtggtaacgcaacttgttgccgcgtttcaggaggtgcaagtgcaagtgagttgcaatggcaatggcaactgcaaggttcacttaaccgatgaattaaccttaattcaatattttttactgtaggcattgcaagctgcaacatcgcagcgagcgaaattcgagtacgagatgctgcaacatcatcccgacctggaggtgctggtgttaaccagctccagtagtggaagctacgtgctctttgctctaccattactgggagacaaacctcaatgggatccgaagaaattgttagagacagaggacccggagctggttttcatccctcacggattccacgcccccaacttctcgactgcaacggacggattgacgatttccatcggatatcctctaaaagatgatgctgacatgaaacttgacggcgcgtggccgcttttcgtcgagtggcccgctaggatgttgctgtcgagccaagtgacgcagactccgccgtcaagtaaggcacaatcttccgtcgaattaatcgcgtcctgcaaaaaggtgagttttcatttggagtgtttgtattgaggcttgtgcattgttgctgatgagaaatcgactgtgtactgtagatgtttctccaacagtggaggaggcgcaaagaatttattgcagaactgcgtcgccacgtgataggtaagcgtgtagtactgtacattcagtgtcgctctgatgggtgtttgtctaacctatagtttggctttgttcttttgagtagttttagagtacgacgccgtggacttttcgcaggtgtttttcatgcttcaggagcagttggacgcgcagtccccactgcgtatcatcgtgttgcggctgcagttcacggccgcgttcttcttgacgaactgcacgagcgacttgcaggtggcgatgctcgacggagaaggagctgctggctctgttgccgtggcgctcggtgactcgagcactcctgccagtccagacagccaagcggacgttgctcagttcctccatgccactcggaagagcttgctccgccacttttacggagaatgaggcgcgctatgaaatcgatcgtagacgttgaaagtatgaaacatcatgtaaagcttgccgccatgagcgtcaccatgtttcacttcctttccagtagacgatcaaatacaccggtgcgccatggtcagtttagtcaaatcacgaatactatatcgcctgtctccgcctccacctacgtggagcctccacggtggaggccgccacgctcgacgtcgcagattacaacttgccgttgaagcccatgcttcaactgcactgaccgcacctcgtctattttgcacaatttcaccatgtctccatgcattgcgagcgtccatcccttcttcgtcggcatcaaaccagaccgcaccagctcaccaacctccaaatgcacacactccatcacctcaagtaccccccccctcacgattaatgccatcgctatcatcgtaactgcagcgaaccgaactccatgctgcttcgtcatcgcaagtggctctattcgtctgcaggtcgccaacttcaacttccagccgtatctatgcacgtcaccatgcattcacgctgcagcagatgcgtcaagtcaacgcagcaatgcttaccctccatcctcctctctaaatcccccaccacaattgcatcacttcccattcctccgcgtctctccaccagcgacctctcacactctcaccccccccctcaatccattgccatgcgcgaggctctgttaacccccgaggacgagcagtacctgtccctgctggaagctcgtcgcgaccagcacttcacccatgcgccattgctctccaacttccgagtcctcgcgctcttctcgtacgatgacgatgacgtagacggccagaccgccgacaagttcgtggtgggggccaacgccgagtgcgccaacatcggcggcgccacgtgcgccgagcgcgcggccatggcgcagctgcagctgctgcccgtcaagcgcgtgcgcaagatctacatcgtgtcggactcgccgcagtgtttaacacccggcactctgtgtcgcgagttcctgctctccagccccttgatcagcgaggacacgccgttcgtgtcacgcgccaagaattgccgcccgtgcgtcaccacgttgaaggagctgtacccgttcccgtcgctctacgaccgactgccccgcactcaagtgttgccgttcgcccgcaacttttgctgccaattcgctggcagtagtagtagtaacctgcaaccgcaagagggggagacactcgtcactccgttcatcaagttgcagctctctcgcatgtctccggacgaacaggaagtgtacttgcgagctctaaaggcgacggagagagactcaagggacgacctcttcccgttgaggtacgcggcgggcacaaagttctcggacggggacgtgcgcgtcacgtggcaacacaagacgctcgagtacggcagctccctggacgccatctccaagctcatcccgttcgtcgaggacaagcagtacaatacgcaacaacccgccaagcccgagttcctgatgcaggtggaccagttcggcatcctccacgcgccgtttgcacgcgcacgagcctatttcttcgagttcggcttcctcgacacgcccgtgctggtgcatgacgccaagggggagctgcaccgcgtccctattggaacgctcgtggccgagtctccggactgtatcgctgcgtctacggccatgatgaagtagatcaggagactattggtcgctttcttcgatgagggcggggctgctgcttctgactcgacttcgtcttgctcgcagcaccttcatgcgcgtctggatcaacgttcgcatctgctggagctgctcgggtgaagcttggcggaactaatacaaaagcatgaaaaggtgttaggatactacaaacaaggataatacaatagccatattcataacgtacaagtgtcgggagcagctctttgaggctgatggtgccgttggagtccctgtcgatggagtagaagaggttctcgacgctcgtagcgctgttccttcggtcgctgccctcgagaccgcagaacctgaccaactgcgtccattcttgttggttcaagtccccggatccgtcttcatcgagtcgagcgagacctacagcgagttgctcgacttgttttacagtgtagtgaggtccgaacgggttcttgcccggtgacaatgctggcgtggatgtagagcgacgcatactgctcgcagtcggagatatcggttggcgctgctctgcgtgttctttaggcactttaggcttggaactcaagagacagacgttcgcgacgatcttctggcacaacttgatcttgcgttcgatgttgctgttgcgacgcagtttctccgggctggtaggcggcgactcggctgtggattgctgtagtattggcgccgatgcactcgagtttagagaagatgataaagcatcaggatggtcgagttcttgcacttgtacagcggatgaggacggtgtgagcttggggagagacacgttgcgagcgaggacgatgacactcgcgtccattttgatgtttaaaccggtcgactccattgacgagcgttgcagttgcaggcgcttcgttggtgtggatttaactgatttgctcaatggggaggcagcgtcctgcagcttatcgcgcaagaactgggacggctcgacatctaacctcctgaaggctccgaccgaagctttagccaccgcagccgcacgacgttcaacctccagaggataattggtcaacgttttcgacgctgctgaagagagttccggggttggttgtggactgtggttcaccatggcacgagctttggccttcgctttggccctcgccctgcccatttcttccggcgtggagaacagcggagcgagcgccgccacgcgcttcttcttgtccgcgacgtccgccagcaacgcagttgagttcttcgcgatacaacggagatgttgcgcttcttccggtccaaagaccccatgttgaacgcctgaagtgaccgaagtcacggagaacggcgcttgcattagcaagacgttcgctgcgtgggtcaaagccgtcgacgcgtcggggaacaacggagcttccgtcatcttcgacggagattcagcctccaacagcgacgacggcgtagcgaaggaagtatcaggagccacctgatcgctttgaggctgttgctgatgtcctgctttacgctgcctcctctgctccttcttcaggcgacgctggtgcttggcgataacttcgcgggcgatgcgttcgaacagctccttcctgtctccacccacggtgtgatcgcgacggacgaacttccaggccgaagcagaggcagacgactgctctcctgtggtcaagatgtggccgacacacgttgctgtttggtcccagatcttgaccacgccatcggcgcctaacgagagcagttcaccaggccacggaactctctgcagtgacaagacaccggcatggtgcgccatccaggacttggtcgacgacaccactgggagagctgctggtccttcgactatcgacgcccgacgactggcaactcccccttcaatcgcttgaatgtcaacgtggttgtactgtgcgttggatgatcgacgacgcagaatcgccgagcgtctcgttggttgtgtttcagactgaggattcccagtgaggaagcggagatcccaagcgaagatctggcccgtttcaatgccaacgtacagcatctctgggtgtgtactggtagctgcgtgtgatggttcaggtgagacgctggtcgagcaaatggaagtgacgccgtccagctcgagtttgctttgtagaggccgggacggggtggactcgaccatcacgagtcgcatgagggggtaagcgatgctgctgcgaacgccgatcgttggccagacgaagatgcctcctgtcacgtcggcggagactagtagtccgggcgttgcagggggaaagtgaagcgctcggatctctcgagtgtggacagaagcgcaacgaaataacagcgtgatacggcggagatcgtagacttgtaccccgccagcgtcgtccgctgtagcgacgaacctcgtggtatgcaactcggttgacgatggcggaggtgaacacgtgcagcacgtgatactcgacttgtgcgccttctctataaagtgcaccacttccagattcgactctcctggcggcgaatccaagacgcagatcatccgatcttcgcccgttgatactaaacactgcaaacacatcgagtgagaactcgagctggaatactatctgctaaatacaaggagcttacattggcatgagagcagaacacgagcgaggtgacggtgccgttgtgcaccattgtcttcgtcaacaaagctccagttaccgggttgtacagtcgaattgcaccgtcctgtataatagtacagtcattcacagttagctgcaatgcatggcctcgttagacattttctctaacgagatgcgtacatttgtcgccacgtaaagctttcgctcacgagggctatcaaatgcaatagcacagacatcagcatctctgatggagaccggctcctcgatcttcgcccccgagttggcactccacacggtgatgcggttctcgacgaccccaacgaacgtattggccacggtgttgaacaccacgaaccgtgtgggggcggtgccaggcgagtcgtccaccgctgcgtcctcttgtccgaccgactgcatcacggcactgaagcgatacaagcgcaagttccccgtgatgatatcgcacgctgggctatcagacgctatgctcgctgctggctcgtggtgcggctcgtgagccttctcggagcttgttccccctcctggtccgttcgacgaggtcatgaacatccgaaagcgacacaaattgggcgtgtggagctcgaaagtctgcagcatcgaggcgagatggttcccagagaagcccttggcgcagcgcgtgatgtcccaaagcttgaaatgtccgctttgatcccccgttaccgccagacaagtagaagaagacacgaacttggcgcccatcaggcagtggtggtgccctcccaacttcgtcttgagcgttctaccgggaatcccccagcagtaggcttggtactcgaacccagagctcaacagtaaagtgtgagcggagtccagcgtcaagacggcttgctggtggcctcgcagtacgaacgagacggttaacacagcggatgggcctccgacagaggaattggtgcctgctacagtctcccagaccgtgatcgtgtggtcgaacgaggccgtagcaacgtagggcgtctctgggatgtctaaacacgcagctaagcgctccgtgtgatgtcgggggagaagcatcggaggcggtggaggggctgcaccagcgtgcatcggtacctcgaggtcccagagctgaacctgatcggtggatccgccagcgacaaacaagcgcttgagtggagggggacaccacttgacgaagagcgctgggaagcgaccgaccagttttccattgaagacgtaggagccgacagtggcgtcgatgatcgaccagagcgagatgcacaggtcgctgctagcgatggccaacgcgttccgagacggaacgtgctcggcgtccataacttcgagagagtcaaacacgtccacttgtttctcgcccgccttcttctccgcagccaacttctcgctgcagttgagttcatgaaggaagttcatgtcgaggtcgaacatctacagcaaaaaaaagttctgtaagtttttgcagtctcaatacagacttgagcatcacatctcacgtactagaatgcgtggagacttgtgttcgatcagtgcaagacgctttagttgtgggaaggccttcaacttgctcacttggtacggaaaagtcctgtattatgtcaattgtcagtaaaatatagcaagaatttactacatgaacacctcgtaccgtgctgccgtgccgctgctgagaggttcttgccggtagactatcgtcgatcgcggaggggcatcatccggatccccgtgggtttgtccctggtcatgatcattctcgtcatgaggtatccgcgtagccaccagtccaatcgcgacacaaaacgacgtgaactcctcccagtccacaactgcatcgccattgatgtcgatctgctcaaacatctcgaacagcagaccaaccaacgcagtcgcgcggccgagatgctgcatcagactcggtcgactgcgcatcaactcccagagcagaagtcgagcaaactcgactttgggaagcccatcgtcgtcggggaaataccgttcgatcccgaggaactcgttgcaactgagagcggcacagatcccagcaacgctcgacagcgggttccgattggggatcttgatgtcgggcatgaggtccaagaggaaaatctgcatgctttcaatcagagacgccgtgactgcgcttcggaccacaacgttgctgcggtcgtcggtggcagcgtggaaggcccagtcgtggtggttcccgtggcgtcggaagattttacacagcaccacgacattcggctgcttgccgatctgtcttcgtacagatttcgggtcgtgcgagattccgaataaacgaatgcgttcccctgcatcaaacacgaatctcttgccgcctgcagccagtgcttgtgcttcggcttcagcttgagcgctgtcgactgcgtgcaggtcgcaggtgagcgagaacgcgttcagctgaggggatccagcgatctcgtcctctgcgtacgtgaccaagcagcccacgacctcgacatacgggtgcagtttggccatggagaaccgcacaacctcccgctcgttcgcctccttcgacttggcgcgggttgctcggaaattgtcctccccgaagaaggaagcattgggacttgagctggtgtggtggctccttgaggacgtgtcggtagatcgggcaccacgaacaacctgcaagacatcgccctgaacgattaattcaagcccatggtgtcaatcaaagtgtccgattggaagccaatttttcagtttgtgtcttgcacctgcgcgttgaacaggaggaacacgagctcgacgatccacggcacgttctcgtcttcatctcgtcggagtctctgcaacaaaggaaaacaatttaacgtcatgctttatcaacaacaaaatggacactttaacttccgattgccaagttgatcgtacaaacacgacgtggggcttggacgccggcagtggcgtcacatcttcgtctttcagtgcgtcccactcgcgagcggaggtcaccgcattggagtcagcgtccattgcatccccaaatctgtgaaccgtgaaacgacaccaagttactagagtctgtcgtttttagcgagttatctatccactcctccaccgcctcttcgacggccatggtgctgcatgaagaagactcggatgagctgctctctcgcctctttcaacgctgcaatggatacgtcagccaaccgccaggagcacggcctcaatctatcaagagtcgacgactaggggccgaaggcccaactctcgctgtgaccaacctccatgatttggctcgtgaattggcagcaacggagcgagctctccaccctcacagcgaagaagcagcagagtgtgctatcccatcagctacgagcaaccaaaaggggcagagcccgacatgggacgagctggaagagatcgttcgcgagctgcatgaactgtaccaacgcggtgacgaagtgatactctcgcttcgggagcaaaagtacgccgagttacttaccaaagctgcagtgaggaccttaacgcacgcttgcttgagtggtgaccgtggagatctggacgcttcgggtgtgagagtgaagcttctggagctggcggtgcggccgaccgagcagtggcgctgtctagcgtttacattgttcttgaacgcaagcatcgcctcagttgcagcgatattgtcgtcgttggaagactcgtcgattgctcgagctcagcacctcgatgttaatttgttcaagctgctccgagagatgctgggcaaggctgtcgtggtgtcaacgacgactctaggggacgaactgttatccagccttcgaggtaggcgtcgtggtctcgattgggtcgaacaagcggtcgggtgtctggagtttttcgtcaagaaggcgaacgggagctactcctcggaccgactgagggcgttagatgaacacacgcttctcttcttggtggctgaggctagcaaccgaagtcgcatagattctgagcttcagcagaaggcgattgagctcgttgtcgcgacgatgtacgcgttcaaagtcgtcccggccgggaaatcggtcggtccagagtggcaacaaccgagcaaggaccacacggtttggaattgtggcctgccagtcgctgcggtggagcaatacgtgagtctcgagttgctgctgtatcatttctacaacgctccgatcgctcgcttgcagcgcttggcttgcatggttcttgtggacttagtgtgcgagcagctccgacgcactggcagccgggaaggcatcagcacggcaggtctcgatcagatatggcgcacgtttgtggagtgggaagacccgtccactggcatacggcaggctttactctcgccatatatttcgagcgctcgggttgtgaagcaactggtcccgagctgctcgttggtgccggagaagcagctcaatgcgttcgtgaaccagttccgcttgctcactcagatcgacgcgtacttcggcgtgaatccaagcatggacaaggctatcaaagtggccaagagccatagtaacggcagtatctcggaagaagtgctcgagcaagtgtccaagcagctgctctcgaatcgcgccgtggaacgctatcgtggtgagcgctggctggcggagcttctaacgtacggacaggacgacgacgtcttcacgtcgtatgacagcaaggcaaccacgactatagggtccgtccgcaagcaccctgaagcagttctagtccgcccaaagcctgaagctgctgctcaaagtccccctgctggagaagagcttgaagagacgttctgttatgacgaagggggagagatcggcctagcagctcaagcgaaattctgggagttagcgtcgcggacaaaccctcccgcactccgtgaatcctttgcaagggtgttgacactgtttgttagacgaaagctgcaactcagcgtaagtatgagactctcgttagcgtggctattgatgtagtagattaatggtgtcttatgtgctatgtgcagtcgggtaaagcagaggtgacgacgatcgaagagatcaacacgtgtttgcgcgtgcttctcgatcatcaagagagcgaaccagcagtgttgatacccgtgatgctactcatccttgatatttgccaatgcgagttgtcatacatcgacaagcgatggcagcagagggacttctcctcgtcttctatttctagcgataaccagcacgaagacacctacaagcgggtggcgtggtcggactcgttggcgtcgagggtgctgaatggggacgtggcactggacaaatctctgctgcggcagattgacacggagttcttgttgcacgtactgagagtactccacgagagctccaacagccaccagtctattgaatgtcgtcgggtctgctgtggagtggagaggtctctggtcggggacgttgcagcgtgcacggcgctcattctcaccgatgctctgtcggataacaacaccgcactcgccaagctcgggggcctgacagctttgactccgttcctgcaagcttgcgacacccgtatcgctgtgtaagtgctaacgcactgttttcacttggttgaaggctgacaagtgttgtttgctgtgctcaggttcatggccaagctcatcggccagttggtgaaacaggccgacgaaactcaatactccgcattcctccgcgagctctacgtcgcctgcgtcgaggccgacgacgagaacgcgctgtacaactcgtacctgcacacgcagacattgctgcacgacatcgacgcgcgttacaacgttgaagacgaaatgtagccattccgacaagatcccctttcaaagtagtttgaatgacgttgacagggatcagaaatataatagccttaaaaatcacataccgagatctttgaaaatatctttgcaaacacctttagaatatggtaaccactcagatcgaatttagcaaaacgactggtcagtacacgtccgcactaaatccgagagatctgaggggatcctcatgccattttcatcgcgaagaatcgtacgtcgcaggaagttgtgccccttgttgtatgtgcttttgccggcaggagcttgatgcctcttgcgccttctctgaaggcgcccctggttgggcgtagagttctgccgaggattgcttgccttggtgtctgggtgggtggggcagttgctgaaaagcggcataccctgtcgagatcctgggcatggaggagggcccctcgggctgcgctggcagatagcgaagtatctggagatattgtgtggagttcttgctgcaatttgctcggaccatgaaacgctccagacatgcatcgagtcaatacaatacatgaatctattcgttcttgtgcgcgtttggccgacaagcgctcgagacctcttgcgcctcttctcctttcggggagggaggcggtgtcgattgggtggagagcgctctcgctggaggcttcccacgctgcccggtgttccctaagaagctgaacgactgcctagtaagctggtggcgaggttaaccgagcacgaggagagcgcctcgaggtgactcggcagatagcgagtcccggggatattaggtggagttctcgctgcaattggcttgggccatggaaagccccatacatgcttgaacacgagttgtagatggaagtttttcggataggatagagttggaacgggtaacatgctcatcgtactcaaatgacaagacacaaagctgtagctagtcaacttggctttcatcccacgtcatgttcacatttacgggagctggtggaacggatctgagctgttggaggaagacgctccgctcatcatggcctgcgaaggctgcgctcctgccgactggcccatggacgcgccgccttgcgcgaactgctgctgcatcatttgcatgttcatcatctggggctgcgccatcatgctcatctgcggatgcatcatcattccaggctgcatctggtgctggctcattccttgcatcggcatctgcatgttcggatacatttgctgctgcatgcccgtcgagccgtcggtgagctgaagctggttcatgttcatgctcagctgcatcatgttcggctgcatctgctgctgtccctgcatcggcatggccatcacaggcgtgggctgatcagcgccgcgagccttctgcaagtcgttcagtgtccgcttctcctccgggttggcggacagggtcttcttcttctcgctcgccagagagtcaaagtctacgatgttgttctccggcaggaggtttgtgcggaacgcatccgcttgctgctgcgactgagctgccacattagaagctggggcttgagagctgccgtcgaatacagactgctgcacaggggcatgagcttggacgggagcaggtgcgaagctcagacccgcaagatcctgcagagggttttggctctgcggcgcatcgaagatcgaaggctgcatctcctgagcagcactggcgggctgggccgcaggctgcacatccagatccacgcccaacagatcgacactcgcgctgctagcagccgcggccgcagtcgccttcttgcttccgcgcttcttcgccttgcgactgctctcctgctccgaggttgactcgtcatccgtcgacgccatcgactgccgccgtgttcgcgacttcttgccggatttctccttcttgctcttcttcgacttggacttggacttcttggacgtctccttctcttcctcgacaggcgggggcggcagcttggccgggtcgaaggagtacgaatagttggccggagcctttttcctgtcctcctcgtcgctctcgctctcctccgagtagaatccgctttgcttcttgctcttgctcttcttctttgccttggccttgctcttgtgacgtcgttcatccgccgactccgtctcggaagactcggaaatcgacagctcctcactctcgctctgctgcgacgcgtcgctttccgactcattctcgctctgctgcttcttcttgctcttcttgctgctcttcttactcttcttcgagtcgctcttcttcttagcgtggcgactcttgccgtggtggtggtggtggtccgtcgagctcagactcttgggctcgtacgccttggacgcgttgctcgtgtagtccgagtaggccttgggcctctccgtggcaaagtcattctggtaaccccctccgctgccattgtagccggcgttgtagcccccagcgccgcctccgcccgagtaggacgacgacgaactgcggatattcgccatccagttggcgcgaccgtcattgcgcggcatctgctgcgcgtagtgctccgggatggcgtccgagttgggcccgcgcgccagcttgccgccgtactcgatgaccttgccgccgagccactggccgctctccaggatcttgctcttccagtcgccggcgtcgtgcgcggcgctgctggcgcctcctccgccgtaggatccgccctggccgtacggggagccgaagcggttgcggtcgtggaagttgccgctcgacgagaagctggaggagccgccgcccccgacggacttctgcatccacatggctagaggtggaggacttgaggtcttagtgatcgatgtggaaatgtgaagattttgtgacagacctctccccagttgaaaagcatctgattatcgaagcggtttcagccaatgagagaggttgaagcggggttttgaccaataaggaacggcgactgtggggtttttgtggagaccatcactccgacaaactttttttagacgcgcgagaaggttcagaagagggcgatggacgagagcgacggcgagcgctggatggagggcgaggacgcggcggaagaggagctgcgcctgctggaggcaatgggcagcgtgtccaccgccatgcagcaggtgagcgcgcgctcggaacgcgctctgaggcgggagctataccgaatagactggcagattctctgacattgacacattttgtgctctttgcttctgtgctgctgcagttcaatcaggtgctggccaagctcaaccgacaaactgtggagctgtccaaggagctgggcacggccgagaggcagctggtgagtggctgtagcagagctgaagacgcaggcagggtctgatagagcttgtgtgtgtcatttttcgctgccagaacgcgctgtatcttcctttccaagccgctatttatgcgatgcagagctctagcgaccgccggaggacgacgctgtcagtgccgacagtgacggccgttgccacgcccgatgcccagcggacagagctgtagacgctgagcgacgacttccacttcctgtagcttgtgtgactgatagagcaatggccagttgatggtgcgtgtatgtagtctgtagttttgttgtttatttgcttgttttgttgctgttcttacacaagtgcactgggtcggacgaacggtcgagctaccacgtcaaacacacatggcgagatgaaggcgagacggacccgtcgtttgcagcgcgctctgcgcgtcctggctgctatgcagtcagccgaggagggagtttatagggagcttagttggggcccaccatctcctcggggcgcacgaagcggtcgaactcctcgccggtcaggtagcccagagcgatgacggtctcgcgcagggtggcgccgtcctggtgggccttcttggccaccttggaggccttgtcgtagccgatgtgcgggttcagcgcggtcacgagcatgagcgagttcttcatgagctggtcgatcttctcgcggttggcctcgatgcccacgatgcagttgtccgtgaaggcgctgcagctgtcgccgatcaggcggatcgaggacagcaggttgctgatcatcacgggcttgaacacgttgagctcgaagtggccgttggagccgcccacggtcacggccacgtggttgcccatgacctgcgcgcacaccatcgtgatggcctcgcactgcgtggggttcaccttgccgggcatgatggacgagccgggctcgttggcgggcagcgtcagctcacccaggccactgcgcgggcccgagccgaggaagcggatgtcgttggcgatcttcatgagcgagcaggcaatggtgttcatggcgccgctggcctccacgacggcgtcgtgggcagcgagggcctcgaacttgttgggggccgtgacgaagggcagcttggtctcctcggcgatgatcttggcgatctcggcgtcgtagcccttggacgtgttgaggcccgtgcccacagcagtaccgcccagcgcgagcttgcacaggttgggcagcacgcgctccacgcgctcaatggagagggcgatctgctcgcggtagcccgagaactcctgtccgagcgtgagcggcgtggcgtcctgggtgtgggtgcggccgatcttgatgatgtcgtcgaactccttgaccttggcgtccagggcgtcgtgcagcttgtgcagacccggcagcagcacgcggtggatctcctgcacggcggcgatgtgcatggccgtggggaacgagtcgttggacgactggcccatgttgacgtggtcgttcgggtgcacgggcgacttgctgcccagctcgccgcccgcgagctcaatggcgcggttcgagatgacctcgttcgtgttcatgttggactgggtgcccgagcccgtctggaagaccacgagcgggaagtggtcgtccagcttgccggcgatcacgtcgtcggccgcggcgatgatcttctcggccacggcggcgtccagcttgcccttctcgaggttgtacttggccgcgcacttcttgaccacgccgaaggccttgatcacgggcatgggcatgcgctcgcgcgcgccgccgatggggaagttctcgaggctgcgctgcgtctgcgcgccccagtacttggagtcgtccaccttgacctcgccgatcgagtccgtctcgacgcggaaggtgctggcggcgcgcacggccttgacggtcatgcgcgaggaggctttgctgacggcggcggagagcatgtctgctgctgcgggggtgcgagtggggtccgacgtgattgcgagactgagggggaagcgggcgcccgaacgaatcctggccgcagcttcgagagcgggtgacgtgtgagggtgtggctcggctttgagctcttgaaggcagcaatgcaattgtgcagggcgccgctccgctgaccaattggcgctgcccatcgagcgagatcctgaccagggaaggggcgcgtctccgatgcagccatccggacaggtagcgattgtatgtatttggctcgaaatggtaaaaccggtaggaaggagatagacgggtattaggagacagaggtttgttaaagctgaagcgatccttttctttgtgtggcacacgcgttgaagttgacccaccgagcgcttcgtggctcttgagtcggagcaatggcaaccgcgccaaaaggccgatctgccagagatcgacccggaggtcacttcgctccgggttggcttcacccacggacacgttcgagtacagatcagcggcaggaatcttcacaaacggtcgatcgttggcagtccaggggcaattcaggaactcgctggaggaaatggcaggttgcgacggagaagggtctaccactcgcggcagaactgagtggggtgctgccaaagctcacaacatctgcgaccgtgatctccccgctgtctaagacacggcgatacaaaatcgccaggcacgcgaacgttcgatctgccccacgacggaaaatcttgagcagcagcagcgcgcgtagctgcgggatcaactggaagtagtcgcaacagtactgctgggacccctccaagcttctgtagaactcgagctcgactatcagtcgaggctgaacggggttttcacccgccagggaagtcttcggcacgagggccgtgtcgggataacgcacgacgcgatactgcgtcccttgacataccatgtccatgagctcagcacatgcgacgaagttggtggggtcgtaggcttggagctggcattgtatccgtatgagaatctcctcgtgcgttcggtatcttgccttggtgacgcacagatcgaccgtcgtcagcggatctgtgccatctccaaagtagcgagcctcgattatgaaactttcgaagttgttaaggtgttcccgaaggagtttcgtcgccacttcttcagataaacgctcgtcgccaggagaacctccacgtcgtgtccaccgtctcgcactagccgacgaaactcgcttatggcgccctcaacatcccaaaccgtcactcgcccgtgtgcgcttgagtggccatgcaagtgaggtaagagaatccactgccatcactcaagcggcttgaacgttgacagtgcttgagcagccacctctctcgcctgctgatgcacaagtgcgcgtcggcggcacctcatcgcatgcatctctagctggtgtttgcgcgattgccgttcctgctcgaagtcagccgcacgcagtctagtattgaggctagcaatgcgctccctcgtgctcgtccttcggctcgtcgtcaccaactccaactgtaccagtgtctgactttgctctgctgcttggacgattttgttcattgtgtgctgctcgcaactgtcaaagcgaccgaaaagtagcacacggagctgcgggtgagaggcaacaatagagagcagtggaagcagaccgtcgggagtaaagtcgttgccggactgacagaaaagaggaacaaattagtaggcgcattagatttcaacaacagagtaacatgatcgtaccagatccagtcgatagagcctcaagcaccgctgcatcatgcgcacaagtacgtgaacacttcgattgccaaaactgttgcgttgcaggtcgagagcttcaattcttccactccaagcaataccagagaccagcacaccaaccataagatcgtccagcccacagttagcaagcgaaagtgctgtgagaagagcgtagttggccaaagtgtagtgcaaagcgctgccagtgcgtggcgcgatggcttcgagacgtggggtcaactgtgttgggttggcaacagtaacagtcctgatcgccgtcgttggtactcgaagcaactcactcagtgcacgaaatccgccgtcaccgatgttgttgtccgctagagacaaagtccgcacgctacgattggagcgcagtgcacgcagtatacgcctcgtgccctcttcaggcaacgcattgtcttcaagtctcaactcggtaaccgaatggttattacgcagcgcagcaccgagagaatccgcctcggctatcgtcagtacgacgtgcttcaaatggcaaacctccagctctaacgacgacatttcaacccacataaccgtctcgcggagcacctctcgctcaattgctgctttgttcctgcgtaggtaaaactccatccttgatcgatacaacagagcgtccggttcgtcgtcatcctggttgttctgcacctgaatagcagtgactgccgtcgggcacgaattcttcatcgcgtcggctaacatctgcagccccagggtcgacagttcattgccgcgcaaatcaaagctcatgccccgcgccttggcagcctgcagcattttaccaagagccccagctccgtcgtcgtcgatctggttgtcagccagattgagggagcgcagcgtcgtgttggtcccagctcggaaaaaggcgacccactccgtcaacgcctcgcagttcaacccgcagtcagccagcaccagcgtcgtgactgtacggttcttcatcagcgacgtggctagacaagccgcgccatgctcgcccagtcggttcccggacagatccacgtgggcgagggtcgagttggtctccagaaagtctgcgagctgcaccgccagactgggggtcactccacagcggcgcaagctcaacttggtcacactcgagtcctcacttacgcaccgcaatagttccgccagcgacgtcgagtccaacttggcatcgtccttcacttctaccgctgtaccgcccatggttgtgaacggctttgtgtcgtttcatgatccaaagtatctgctccgcaataagtagtcagctcaatactggaggcctagtatgcacttattctgggtcaacaaagatccaaacggaggtcaaaagctgaagagatatccatgtcaactcgtcgctggttcactgcgttgctgctttggagctgtggcttcttctgctatgcaacgtcgtcgagcatcgacgagatgtggcaaacggcggacaagttgtggcagtccgacgacctggactcggccatgaccgtcctgcagcgcattgagacgctgcagccaggagatcgatttgctctcgtggggatggcgtcgattttccagggacggagggactttgatcgggcattggagttgctggacgtagtattagcccaaacaccagaagaccccaaggtgctgcagaggatcggcgaagtctacacggacaagcgcgagatccccaaggcgctggagtttctccacgctgcagagctgcaaatgcatacaatggatacagacgaggtgggcgacctgtcgcaccgcttggcgttggcatatcaccatggaggagacttcgccacggcggagacgttgttcggtcgtgtgggcgaaagagggcgcactgcagcgttctacttcgacttcggagtgactttggagaaactcggcaaggcgcgtatgtcgttgatactttatcagcgttgctagccggaaaagactgacggaaatgtttgggtggggcagattttggcggcaggggatgcgtacaaccaggcacttgacattgatccgaaccaggcagaagcgaggattaacatcgccgcacttcatcaccagtatggcgacgtgaacgagtccattcctcagtatctggtgcgttttgtctactgatttagggttatcgagcagtgaaggctaacttgttgctgcagcatgtgattaactcgccgtcaacaccagcgaacctcaggatcatggctatgggcaatgtcggtgcagcctatgaagtctccagcgacattgtgaacgcgttgagctggtacgagcgggcactagaagaaatcaattcctcttcagaaatcatcttcacagacagatttacgactcagtcgtcacggctgcatctcatggtgcacatggcgagggccaagctgagcgcctgcgtgtggacagacgcagaaaacgactttgactctctgtgggcgacggtgaccaacctgcaaatgacagtgggcaatctgtatgtcttgacgccgttcgactcgttgctacacccgatttcacctcaagaaaggaaagcgctggctgtgcatttctctatgaagtacgatgtcgatctcgctaacaagaagaacgacagtttatcgactgcgtttcaagtgaagccacccgaaaacaaacgtaccgagcagttgaccaggctgaatgttggatatctatcgtatgactactcggaccacccaactactcacctgatggagggcacattcgcgaccagagatcgagattcgatgaatattgtagcgtttggatacggacgagatgatggcagcgcattccgccagcgagtggtcgagagtgtcgacaaatttgtcgatttgtctacagtgtccttcgaagagagtgctgcgcgaattcggagtgaacatatacacattgttatggatgctcaaggacacacgcgcagaggtcgcatgcaaattgtggcagcccggcctgcgccaatcgttgtaaattatctggtgtatcctggaacctctggggcaccttttgtggactatgtgctcgtcgacaagttcgtggcacctcctgcagaattagcctcggcatttacggaaaaacttgtggtgatgcctcactcctatcaggtgaactactacaaacaagtactccggcagtccgaaaggatatctcgtcgatccgatttgtggcgagctgacgatgacaaggaagatgaggacgatggattcttgttcgtgaatttcaacaaaatcgacaaattagaggcatccgtattcagcacgtggatgggcattttgcggcgtgtacctcggagttcgctgttgttgctggaccctggaagacacgtgctggatggtaatatgactcaatccgtcacgagtcatgaaattaggaagaacctctggagggaggcccaagcacaaggaatttcaaccaggagaatccgatttgtgtccaggtgagtcgaatacgagcgttaacgttgcgaagctagttatctaactgtatactgccaacccagaaccccaaagcttgaacaccttcaacggcaccgtacgggagggctcttccttgacacttttattgtacgttgaataatctctttgaattcggacatattacttactgttttcaaatgccccctgcatgtagtatggagcgcattccaccgcgaccgacgcgctttatgccggacttcctgtgttgacactagccggtgactctttcgcaaggtgcttcgttgtacggcgttttttttctaagttgtttggctaaccctgggttgactgtgccagccgcgtgggactctcactactggaaaatctaggcatgccagagctggtcacctttagtcgcaaggaatatgaggatctagcaggtacgggctccaactacattcggttgtgcactaaccaaccgtaagtctgactttcaatcatgtatgaacgagtatgtctttgattatagtgtatctgtcatcgacaccttccgttctcttacaattgcagcgtcggcttcgaagtgatcaagtcgagattgagcaaccgttattccgcaccaagcagcacaccgagcatttggaagcaggtcaacgtctgatgcacgacatttactcactcacaaatcgtacttttcatctggtggttggaggtaggagcaaagtttggggaagttggaacgatgtgagtgggtgagtgggagctttaacttatacgttgggtatccttactgttcgctgtcttggttcctttcgcttcacttattcgcttgcttgcggaggttctgcgtgggtgtggtgctttctacctatggtctctagtggctgtgagcccagtcctgtgtgcgatgctttcgcgccgtggtgggctgaatccacatcatcaaagttatcggaccgtcgtcttgagtgtttgtggtgggcaaccggcaatcgctccgagtcggcgtgcgctggagctcgttcggcatgcgacttgtcacttccgttgctatttgaatttgcaccacttgaactacttgtaggagatgacacaggttgccgtggccgcgcacgagtattacccgtggacgaggcataccgcttgaaggtgacaggatgattaggacttaacgctactggcattggcgtagtcatcgttcctgtgctcccggttccacttggtcgtggtgactgcttgtctgctcttaatgcccccttcggctgaagtgggttatccatgatcctcccaccgcgtgaccgccctcctgtcggtgttcccgtagacggcgaagggctcccgcttgagtttaccgccgtgttaccgccaccattagatggccctgaagcaccctgggcatttccaattagtcccgcgagatccgtccgagaaagccgcggaacaatcgatggtaacttgtcatcgtcgttagttttggctgccatggacgcaggtgcaggcgtatatgtgatcgcgaagctcccgtcgtcatcatcatcttcgtcaacattatcttgcaaagaagcacacgcaaaagcagtggggaggcaaccagatgcgccggccgtgccgcgcacccatgggtgactgaaaatctcggggatagtggctcgctcgtttgggtcaggcttgagcatccgaattacaagatctgtgagcgcaggactcaagtctgggtccagcttaaactgacatcgcatgattcggttccgaatgacgttttccctcggtcgattagtcccttgaagatcagggccttcgaaggggagccggccgcacacgattgcaaacagaattacaccgagactccacacatcgagcggcggacctgcattggacgtgccacgaaaaacttccggtgccaagtacgatatagatccgcagctcgttttcatcatcgcacccggcttgtagaaatcgctcaaaccaaagtcggcgatcttggctgtggaaatatcgtttttactggcaaagacaagattttgcagactttagcgttgtaggacgtttaggcaattgaaattggtacaaacgtacttggtgagtaggatgttttccagtttgagatctctgtggcaaatgtgttggttgtgagcatagccaacacctccaaggatctgagagaatagcccaacgccatcctcttccgacagaccacccggaaattgcttgatgtagtgaaacagatcgccactgtacacataaaacacaatatcagcaaccgtttatcgaaaacaataagctctggacattgattcacttacccttccagcagctcaaacaccaacacaatatggttgggttcgttgatcacgcgcagcaacttaataatgctcgggtgattcagcgcctagcatcatagcttcgtcaatcctgcaccgaataccatagaacaagtatagcagctatacataccgtcagacattggatctccgtcgtagtgcgctccacgtctcccaacgaccccatctcgcttttctacattataaaacactgcgtcaatataatactccacaaccaacaatctccttcaccctgccagccctcaccagaatgaacttgagcgccactttatcgttcgtgagctggtgaaccccgagtcgcacttctccgaagccccctctgcccagcagcgtggtcaccttgtagccccccaccacgttggccaccttctcgtccgtgctgttctgcgcgtcctcggcccccgagttgggcgccttgaaggacctcccggtggagaagaagagcatgtcgttctcctcgatgcacatgatgtcgtcgatctcggcgccgtccgcgttgaagacccgcgaggccatgggcaccatctccagccgctgcgacgccgcgcacaggaactcgtcccacgtccagtggtgctgcacgaacagcactgcaacacagtactaaatattagcattctgctctcaattgtactagggatcgcttatagggccacctttggggttgtcgaagtggccgttcttgaaggccttgatgggcttcccctgcaccgcgtggtcgctgaagtcgtccatgtcgtcgaagtccgccatgttgagccccgtactcagccccgcggcatccgccggcgctcgtcgctcgctgctctttgacgcccgtttccgttctcggccgcatcccagcgcggcgccgctcaatcggcgctaaatatagggcgatggaggataataaaaggcaactgcaacttcatgaccatcactcctggaaaccttttggatagaatacgatatgcggttagagaggaccagtcgctccaaccaacggacaccaacgaactaagaccaaccatgtctgccaccgtgatcccctcggtggggccatcgatggctgaacacctccacggcctgcgcggcggtgctcgacctgactttcaggaaccactcccctcgcctgcgcagcttcaagagctcttcgaccatcaccgggctgatgttccccttgaggacttcctccgtcgggtgtgtgagactcggcctactggcacggccactgccacctttccattgatgcttgactccggcaacttcttccaaggggtgtcgatgccacgcatcatggactctcttattcgggacaacgggaactcggttctcaaacgtctactgcgtgagcatgctttcggcgcgatcgacaaacgccgagatggcggcttacgcatcctggttcgcacaagcgaagcgcagcaagctttgaatggcgaagaggtatcgatcatggggaggaagttccggattgggctagaatcgcctctggctcaatgcttcttccttgatcggcctcacacccgcggaggaggcacccaccgtgatcgggtccctggcctctcgtggggctaaacctgtgtacttccgacctgctgcctacgataaggtctcaggcctttgctctacaacgtggcgtttctactttccaggggaagaggctccaccaagcctcttccgcgatgggagcctacgctcctacgtccgtgtggggaggaaatcctaccgatgcttcggtaagaatgacgcgtctggcggccgacctcgccgtcaaaacccaccgggggaaaccccggcactgcgtgtgcatcagcgcacgagagaatcaagtggtgacgacggacccacggctgcagtcaccggaaacgctgctgtggccacgccagctccttcagatccaggacagactgtcgctccccaggaagctgtaccgtcgagtcactcaccccagcctgaggagggtggtggggtgccgactcagtcggcagactcgcgcgcacgctccatgttgggcagggaggtggtcggtgcggtggagccggtccacgatgacgaggcaatgctggagcaagtctcgggggggggggggggggggggaagcgcgctcactcgccgagccattctccgcctcgctccccaacgctgcgggttaaaaatcgctttaacgtacttgatgatttcgacggcgatgccgacctagaagtcgccacagccaacgaggaggacgctgtcatctatcagattctgcctagggtgtctgcagctactaaagcccgagtccgccaccgcttcatgtcgaagcgcccaaagcactcgtctggttcccgagaccccgacgccgatgaagccatcaccaaagctctgcaggaactcgaggagacatcgctaacagctcaagcggcagtggacgccgacgccataggggtggccgaacgccacgtcaaggcggtcaagttggagttatccagggccaaaagcgcggagagtctacttaattcgatagtggcggctcctcatgcctggcaacttgcactccaagcttccgaggtggtcgatcagttcgaagacttcatctcgctacacgctctgaaccggcaattgctccgcctgccaaacgccagctccaagtcgtttacagcacggctcgcgactgtcgatcagttccactctgggtcccgctctcaactcattgcctctatcacagctgcggcagggtcatccgaagaaggtcgcattggctggctccacgcgcgatgtgtcagtctcttcgagctactattgattcttatggctactcacacgtttcgagacgactcgtggctcgccatcttcgcgaccagctccccgtccttcttgaagcgtaaagggctgcgtcttctggcggaagccacgttgcgagatctgatccactccagctacggtgtcacggttgtcacggaaagcctttttcggctgccaggcctcgccactctactcgagctctctgggttgcaagcttccgccgacacggtctggatggacctgacgctgtcagaggtgaacccagcgacggctgaccaggatatgggccccgaccgcagctaaggtcttgccggactggcataacctcagcgtgctctccgccaatttgaacgggatatcgccaactggcacggaagtggcccacctcgcccggcgccatgccattgtgtgtatccaggaatccaagctgcgtgatgcgtctcaagcctcgacgttgcgtttcgtggtggaggcttcggccaagcgcaaagctttcatcaatgacaggaacgaaaatcactcgggctcaagggccactcgtagcggtggcatcgtgacggtcattgaccccagcttacccggtttatcatctgcggaggaacttgttcagcaccgtcgcgagggcagatactcaatcgtacgactggtgatcgggccttcggtggtgtatatccacaacatatatgcccccaatgacagcagggagcgcaataacttcttcgcaacgttacctcggtctttccctgaggatgttgtccacattgcgtgtggcgacttcaacttgacgctgaacccctcgcttgacgcgctacgacccgcgtcagacccgagccaagctgaatgtcgggactggatgactgccctggcactggaggactgttggcggacccatcatccagcggactatgttttctccgggcccacaagggcaaacaggatagactacatcgccgtctcggaggacctctgcactcatcagtacgctgactccgcgtacgtgaacctggacaaaggaggagatcacctcggcgtccagctccagctaaccagttggcatcatccacgcggtccggcttcatggtgggtgccccggtggttactcgacaacgaaggtatccgagaggaaattcgtacggcggccgccgagctgctgcgtagcctccctagctctgacaatccaggcgtcctctggtcagcctggaaataccgggtccgtaagtacctccaacgccaatgcagtttcctccgcgcgcgaaatcgtcatgttcacgacgcccttgtccgccgtctggaaaggctgtcatcgctgcgagcagtggactcctccccagcggtggccatcgcatggtatagtgccaagcgggacgtcgaactcatgttggaggaacgtgaagtctacaggagaagctatcgatttgactatttagcgactgcactggagaccaactcgtcggccttctttcgtccaccggagcctgcgcggcgggtaccgctcgatcgcgtcgagctgcaggatgggaccgtatccacggatccggcaaccatctacgagactttccagcagaaatggggctgtatcttcggcgataaacgatttgtcacggactcacaagacgtcgctgtcgacctgtctgctcaggaccagctctcaatgcagtggaagatgtgcttgcaccagccgaggctctggaccacgacagcgagttaccagaggaatttacagaggcgatcatttcgatgcggagcgacggtacaccgggccccgacggattaacggcacgcttctatcaaatcgctccagacatctttggggaagttttggctcgggtattcgacggtcagttccagcgcggcactctgttaagccaccagaacctttccgaagtcttcttgctgcacaagaaagggtcgagagcgcgcgtggagaactaccgaccgatatcgttgatgccagtggaggtaaaagtgctttccagggttctcgtcgagcgcttaaagcctctgatgcacaagttggtccatgaggaccagcaaggtttcatccccggtcgctcgctccatcaccacctgttgttgcttttggacctgcaagccttctgccagtccacgggtcaatcggggttcgccgcttttctagacttcgagaaggcttacgaccgagtcgattggaagtacttgcttcgtgtcatggaacgacaagggtttggtccccgcttcctcaagtggatccacattctttactcgaaaccagcttgctccctcatgctggacggctggagccaacccaaattattcccgtctcgtggtgtgaagcagggtgatccgctctcgccgtacttgttcctgctggcaatggtccctctgggagtgatgcttcgccgtcaaccgggcgtaggtatccctctgcctatgcgtcgcattgctacaagcctcttcttcgcggatgactcgttgctcctcgcagcgtccatcgagggggtacacgcccaacttcagacagaccaagtctattgcgcgggctccggagccaaattaaatgcctccaagtctagactgcttccgctgtctggcacctccgccaggataacttcggctccgctgccggtagtcgcagccgatgaacgtgttcgataactaggcatcgactttgggtataatgttaacgccgaggccacggagcgggaccttgaccagaagctgagccaagcactgcgacgatggcagtatcgcgcccgcactttcgaaggccgcaaactgatagtgacgacgatggtactctccttgctctggtacaacgcccttcatctcgtcatccgtccgaccacgatgcacagatgacagcgcatgatcattgacttcgtcgtttacaagaaagtaccacccgcctcagctcggatccgccttaccaccgcagaattggcagtgactccgacagcgcaaggaggcctcggtgtcccagaactcgccttgttcttcacgccacaagatgcgactattccaagagtttgcagcgacggtcgaattgtcgaccacatctacgattccgctctgggcagttctccccctttgggccgccaacggcggtgagatttcacgctcgacccgtctcgacgacatattctacctatccgcccgtggtcgtcaacctggccacgtcacgtcatggtggaaatgggcgtggcgccagtgttaccggtctctcttcgactttctggaacctattggagccactttctctctagctgacttcatgcactggtttctcggccgccatgaactgttccggtttcgtgatgcccacgctttgttgatgagagtctttcagagactgtccgtggtgatccacgccattacaaccagcaccggtggtctactcgtcgttctccaacgtccagactcagtcgccggtctactcggcgtcacgacacagtcacgctttcggttctttcctcatctccgcaagcaagattggaccgcgctcctccgtcctccgacctcggcatgggagtctcgagccaaacgccttcattgcgaagttagcgcgctcaaaggtcactccaaccgactggcgctagtcaagcgatggatgctgcctaccacctacgacatccagtttcgggtgctccatgagctgatgcacgtgaacagcaagcgtttctttctccaaaccggacgccgcgacccgaccacctgccccagacaagattgctaccagcgcgagagtctggcccactgcttttggctctgctcaccaactcagcagacgtggtctgcactacgtccaatctggtccctgctactccgttgcacgccctcctggttgggctttctcctcgggaccacggagctgcttcactcgagctgggcagcgcaccacgaactggcatacggcttgtggctgataatccgcggcattttcatgcgagccacctggatcaaccgaaccaacgacgctttcggtcgggaagctgctagccccaaggtcattgctgccggcgtcaagtcctccttcattgcccatttgcgctcgctcaaccgtcgacgccacatggtcaaggtcgacacagccactctgtactccttcatccagcgccttgtcttcggccctgaggatgactcgacgagccgctgcgcggatactccacgccccagagtgccgctctggatcgcccatcgttaagttgcatatttccgtacttagtcaaatcagcatcaaacgaggtcgtccacccgtaatagaactccttccaagaagttcagtgggaatctacagactgaagcaagctcgagctagtgcgcggccgcgtgcgtggaccggaagcccctcaagaagaaagacaccatggccagtgccctcccgcgccgcatcgtcaaggtacgcggctctaacggcgccttgctaccccccccccccccctctcctccctgtggggcgctggatccgtcggatcgagagactgacactgcgcgtatctgcaggaaacccaacggctgctcgctgagcctggtgtgtggagtatgattacttggaggggatgatgttgtgcgctaacggagtgatgttctcgtatgcagtcgccggtatcagcgccacgccgtacgaagacaacctccgctacttccaggtggtgatcgccggcccgcagtcgtcgccctacgagagtacgtgggtcctgtccttgcgatataactgcagaggggtgcaggcgttgatagggctcttcttttcttgtgcttgatagacggcatcttcaagctggagctgttcctgccggcggactaccccatggcgccgcccaaggtgcgcttcctgacgcgcatctaccaccccaacatcgacaagctgggccgcatctgcctggacatcctcaaggacaagtggtcccccgccctgcagatccgcaccgtgctgctgagcatccaggcgctgctgtcggcgcccaacccggacgacccgctggccaacgacgtcgcggaccactggaagacggacgaggccggagccgtgcagatgggtgagtgtgtacgaggatatggttactgtgaagcgctatggagagctgacttgttgtgttgttacttgtggtgctttcgctgttgtgtagctgcggagtggacgcgtcgctatgcttgagttcacgagaaatagcaagagcagagctacgctcttcgattagtttcgcttttcacaccccattcttttacaattttttttcatctttgctggaaatgtttgttttttaggttttgtttcccccttagctctagtttgcttcagctgcgacaacagccttaaagtgtaccatgcactcgtcgcgcgtcttctccgggtttgaaagctgccacgccagaatgcggtcgagcagcgccttcatattcggtccaggctttacaccaagctgtttcacgagatcgtttccctattgagacgcagcaatgcacgaagtaattagttgactgttggtcacaagcgagcaaaccccagacatcgacaatacttacattgagcaatggcttcagttcccagacgccatcaagtcccgcaccactgacttgtgcgttgaaggtgtcgtagcgcttagataccgtggcgcgggcctcgtcatcggatccaccgtcgacgagttcttgcaccaaagcgacatcacgacagagctcccagtgggcgccaatgctgcggatgagaagaccgaccttcacacggtcgaagtcctctactgtagccacctgaagttcgccaacgtgcgccagaatattatccacatccttcgcgtcgcggttaggcagcttcagtgagtcctgcacaacgaacgtggcgaccgaacggcggcgcttgtcgcgcgcacacagtccacggaacggcagcaagaacgaagccaaaatgcgcacgtgcagcttgtgtttctcctccgtcgacaaactatcgacgtccaccacaccaccagtcgacggagcaagatactggtacatctccgacacgtaggcatagcaccggtcccacacgttctccccaacctgctccacttcaccgtccggacgacaaacgggagtcttctccagcagagccgagggcaggaacacgctctcgcacaagtgcagctcatgcagcagtcgcagcgcacgttcaggatgcgcagcgctgcccgtgagcataccggacagctccttgccgacacgttctcgactcaccttgcgcacgagcgccaccttgacctcctccagctgcgccgcggtgcgcagatcctcctccagcgtacagttgaaccgcgacgcgaagcgcacggcgcgcaggacacgcagcggatcgtccaggaaggtcacgcgaggctccagcggggtccgcagccgtccgaatctcaggtcctcaactcctcggccggtgaagtcctccacctgcctggtggccaggttgtagaacagactgttgatggtgaagtcgcggcgctcggcgtcctgctgcggcgtgccgatctccacggtcgggatgcggttgtcctcggacgcgtaggtctcggcccgcaggttgacgaagtccacccagcccaggtcgtctccgatctgcatggtggccgtctccaggtgcttgctctgctccgggttggccttgatcacgcccacggcgtgcgcctggcggccctgcgccgtctcgaaggcgttcacgaggtcggcgaaggcgcggccggtcatgcagtccagcaccacgtccacgtcgtcgctgtctcggcccagcagcttgtcgcgcacccagccgccggccacgcgcagcacggcgccgttggctgcgggctgggccgccacctccaacaggaaggagaagagcttctcctccgctgcggtgagcttcacgctgggctggaggtcgttctgcatggctggagagggctcgtgctcgtgctcgtggacgcgctgcttcttgccgggactgctggaaggcgacgccaagcgcttcaccatgctttggggtcggtcaatggcgatgacaacagggcttgtgttcgggaagggcgctgtattaaagttgtagtggaaagatagatgcttgttgtggtctggaggtgagtaaaagagtgttgtcttttcgatacggatcgattattcaggtggcggaccaattggaagatggcggacgatggcatcgcggcggcggagatcgccaggcagatcgcggcactgcggccgcgggtggagggatcgagaggcgtcatggcgtacctggttagtggaggcgatggcggaggagactcttttattggtgaatggcactaacgttgggatccgcctgcctccaggacaaaccgccgagtgacaagcgcgccgatgtaaacaaaacgttcctggccagcaccatccgaaggtttgttggcgttgtgctgcgttgaacacacgcagtgagctgatcgtacaagtgtgtgtttgctgcagtgtggactcgcacaaccgacggcaggaggaagacaagtgctggacactgcggcggatggagcgaaagcttgacgagtcccgcgatcggcggagatccagccggaggagtcgcagtagaagccgaagtcgggatgcgaggaggtccgatggtaggaaacgccgacgcagtcgcagtgcaagcagaagtcgcagtcggagcagctcgcggcggcgtcgacgggatcagagtgagcgcagcacgtctcaggttgcacgcagtcgaagtcgcgaccgtggagcggttggtgagggaatgcgagaggatgaagacgagcgcagctactgggcaaggaagaaggaggagaagactcgtcagctgtgggagaacctgcactcggaggggaccgtgtcggtggagaacgcacccgacttcagcgccgaggaagactctgacgacgacgatgtcaagccgactaaagtggaatcacctggtcgtagcgagaagaagcgcaagaaggagaagaagagcaaacatagccggaagagagacaagaaggaaaagagacggcggagccgctcgtagatttcaggaccactcggttaaatcaaacatggtgttgcaatgtgcagtattgcatgcaggttgatgatggacttcataacaacgcgactttcatggtgaacaggacgtgcaggcacgtaggtagtcggattagtagatacacacaaatgcagggccggcacgccgcactattctctatctatctcagatgacgacgctgaagtcgttgcgcttgtcgcccggcatcagcagcttctgggggaacgaggccgcctcgttcaccgtctcaattcgctccaagcagaagaaggccaccttgggcgactccttggtctcgcgtacgcggaatcccacagcctccaggatcttggtgaagcgcgcgtacgtcatgaactgcgagtggcgcagacacagcagcggcagcatcaggaacagcagcccgccctccttcaagtgttgtcgatagagccgcagcatctcgccgcgcttgtcggcgcctggcacgcagttgagcaccatgctggacacgagcacctggaactcgctctcgggcttgaggctgaagaagtcgcgctgctcgatgcgctcgtgcctcgagttcaggtcgatggcgcgtacgtcgagccacggacacgacagcagctgcgtgttgatggcgcccacctccagcacgcgcagcggcggctgcttggccttgggccgcagctcgaagcgcgtgagcagctggaagacccacttggacgtgcggtggaagctcgtgctcaggatgctggcgtcctggtaggcctggcgcccgcccagtgcgtccagctgcttgttgatctcggccacgcgctcgttgcgctcccgctgctgcgccgggtccgtcggcttctgctgcttgaggcggtccagctcgtgcgtcaggcggtggaagttcgtggtcacctggcgcgccttccgtcgcgacttcatgcgcggcggcgcgatgtgcagcgccttgcgcgacttcttggccttcttcgccgccttggcgccgcccgaagcgcccgcggactcggcagcaccgccgccagccgtgatgcccatgttttcgggaaatggctacactgtcggtgttaagacctgtatagtgtcataacctacggtatgccatattagtcttgcgtgtcattagcagcttcaactacatgtactggaaatgctgcgctgcgtagtcttcggtctctccttgctggcggcatggcgcgctgccgcagccttgcaggacagctccgccttccgacgagacccttggacgatgcatgatcctggattccccgttaaaatcgacgtggcgccgtcgcaggacgagctttggattgttgcgcaccaggaggaggaggagagcgaagccctccacggtgctggatatgtccgtggctttccccaagggcttcagcactgacgaggcggtggtcaccatgtccttctttgagccgagcggcggctcgacgagcgacgcggactttgcgttggtcgtcgactcgcagctgcagtacgtcaagcagtaccgagtggagctggacccgaacaaggccggcgaccgcttcgtgctgcgtgtgtatgtcgaagccagtgctgttagagtgggcgggacggaggtggaacaaggtggggccaagctgcgcgcgttctacgctcggtgggtggacctcagtccgtcggagcccatgttcctctcgtgtgaagaccagaagactgaagacagcgctactgaggagcaagagcgagtgtcggtgcacccgcccgccaatatgccgcctgacttgtgcagttgctacactatggacggccgcgtgccagtccgcaagtggtactttgacgaccaaacgtgagtttagtgctctttccctgttgctcgtgctgtgaaggtgctgatctgtccaacgtttgctgtagtggtgcggaacgattgtatggagaggcgtattctgctgaggctattcatgctttggtcgaggaagcgcggaagcgtgtcgctgggtactctgctgctgacgcgttcctgtatagtgcgctggacaagtacccgctgaaagacaaacacgtgctcatttttggcagtagtgggcgtccgtggatcgagagcttgtgtcttgcgcacgaagcagcatcttgcaccaccgtggcaaggaacaggcttcgatataaccaccccaagttgcagaccttcactaccgacgagtttaacgacgagcgtgcagcaggagagagctccctgcactttgacgtcgtgcttgcagtcaacacgattgcaagggagggtcttggtcgcagtggagaaaccgctcgatcccgacggagacctgaaggctatgcaagagctgcgtaagttcgctgcaccttcgtgcagcgatgcgaagactgccgcgtcagtgctccttgctgttcctgttggacccgatacgctggtgtggaatgctcagcgccagtacggtcctctgcgactgcctctgctcctgcaaaactggcagcttctcgacagcttcgggttctcacagaacaacttcacggctcctttcactgtgtcgcacctgtctctcttcgtgctgcaaccctctgcttcttgcgcccaagcacacacagagctgtaggcagcagagtgttggagcatcaactcgcagttggcatcaaattagaagcacacgggctatcagacgataacacatcgatcacactcaaaattcaaaggcttggcgagttacatgtaatcttacgcagtgcaattatggcttaagctgctcaaagctaagcctgggaatgaattccttaagatcccgtacggaaaaccggcacggtgacaagcgcacctctccaaacgtactggacgtggcaaatgtactgacctaattccaacccgttgatcaccgggaaggttggcccagggcagcagatcgcgcttatcaacgcagtgactgcaactttcgggtgccgaacgttgatcatagctgctggatccggatgaggttcaaccggacctgccggaattccatccgcgaagtggttaataatgctcgttgcatcaaactgaagctcaatggcgatctcacgaggagggcaccttctggtgcctcgtatctccgctggtggcgaggaatgggctatcatcagtggactgacatcgccaagtgaagcagcccagcgttcatacacgccccacgcttccgagtgcacactttcgactcgcagaattcttatgtcctctccgtccagttcctccttcttagcgccagcagccaccattgccgcgatcactttcttcgggattctggatgagggcacaattggcgttttcattgtcttcttcgcggtcttcttccccttccttggtttttgcaagaatgggaatgcacaatcgatgttttttttcgcctgcacatctacggtactttcgatcaatctagtcaaattctatatttcagtctcaaatatcgtggactccttttcttttgggagtgaggtttggagacgagtccccaagtgatcaacgattcaattaggagtctcgactggaatggggtccaggacttactgcttcgtgatgaagatgtcgacccggaccctatcgaggtgtgcacaacatcagtggatgactggaaccgctacgtcaggtcgccaaaccaggcgatggagcccaagtatatggagtggcgggacggaagaatttggatcgtggagtgtgcgggggctatagactcccttactgccggaaaattcattgtggcgatgtgcttggcgaccgggactggggatgagcatctggagccgtataggattgccacgacgaagaaccaccagcggatacgatactggctgagccggactgcagcttcggaccgagtgtcgatattggagccaggggaggctataggggggggggggcaccggccccccaaaacattttccagcaactcgaccctattttcgagcctccacgttacgcaactcacccccgtatttttgacccaccccacccctgaccccccttacgatttgggtctggttctgcccctggttggatcgacgtcgggttcttaggcaataactcgaggcgcatgaatggctgaatgatgtacgtgttcgcgtagccatattactcgaggcgcacatgcacctcgaaatgcccataaattcattttaaaaaatgaattttacggttaaaaccgtcaagttgttatttacatgttaacggacccgaaacagaattattttcaaaaactatgagttcccaatagaattagcggatatttatttattcatttccaggaattttttcctacgttgaaggcatcttatcttccgacaagtcgctgctcgcgatggggaacaaggcgagccgttcgacgtcggcgtcgcagctggcactggaggcgctgctggcgcggcccagcgcgctgcagcgctccatgttctcgttgcatgcgacagcgcaccatggcgtgcccagcaacgcgcgggcgctggccttctgcgggctgcagggcctgctggccgtcggcaccgccgcgggggccgtcaagctctacggcggcgaggggctggaggtgctgctggacgcgcccgagtcggcctcacacctggccgtgggcgtgatgcacttgcgcttcacggcccgccagcggctggtcgtgggctacacggacagctcgctgcgcgtgttcgacctggccgtagcgggcggcccgacgctgctaagctgtgtgcccgatagctggacgtccagcgccatcacgaacctcgagaccatcagctacgccaacttccccttcttcttcgtggccaccgacgacggggacgtgcacgtggtgcaggaggagacgggccgcgtcagcacgtacgtcatccggccgcaggacctgtcggtgcccaacgctgagggcgtcacggccatggcctcccacccgagagacagcaacctgctgctgcttgcctacgacacgtgccccgccgtgctgctctgggacttcgccaagcgcaaagtggtgcgcgagttcacgctctcgggcaaggcgcacaagctgtcgtctccgcagtcatccctggccccatcggagtcgtcggccgacagtggagaactcgtctgcaactcgccgcagtcgctctcgtggcacgggagcggcaagaggttcgtggccgggtacaagcacggcggcttcgcggtcttccgcacggaaaagtcgcacggcttgtaccgccacgttaccgaggccaccccgggtgaccacgttgcacccgtgaagcagatcaagtgggtgtgtgccccgccgacttccagacacgctgctctgccgggggccattgtgttttctggcggccgcgccgatccgagtgaatccaagttgctgactgtggtgcacccgccacctgacggccgtagcagcgatgacacgctgacggacctgttcaagtcggaaaagctgacgtggcttgttgcgacgatcgagtccgccaaccatgcggaaatcgcggcattcgaggccgcgcaggaccaggtggactactgcgcgaagatggcgccgctatcgctgattgtgttatctggaaaccctcttgatggctgcctgccgacggtaagcgtgcaatgcctgccttgcttcgtgaagctatgcgatggtgacaaggaggaatgggagtggcgaatggagcgccttcccgaaccggcaattgttcctccgctgttgcaacttagcctgctcaagacattcgctatcgtgaatctttcccactcggatagcgctctccaagatgatttgctgtcaacgtggaaccaagcgaaatacaactccgtattccgcttgtgtgagagcggcgatttcgagtggcccatcaacggcggaagcattctcgaaccaatgctgaagggatttcttgcaacaagtggggcgctggataatggaattgctccgaacagcatgttgctgcttacgggccatgccaatggatgtgtgctgttttgggaagcgcggactgcgggtgatcgagctagtaagggtgctatccgtcttcttcacgtcgtggacacaccgctacaaatgtcgccgcctccagtcaacgcagtggttacgtgcttatccttttgcactgactcacgcactctaattgttggattcgcttccggtgaaattgctgtactcgagttcgatcagctgaaacagcgagagccacctgtagctgacgcaaatgtgatcggtgccgagatatcggagcaggagcagaacctcgagcgcggtgacgactcaggagcgttgaacgcggatcaaacattgcaaggaacaggtcagaaggaggccgtggggttccgtacgctattctctcttcatgtgcacaccgagccaatttcaaagttggcgctatcctcttcgtacggatacgtggctattgcggatgcagcaggcatggtgtcacttgtcgagttgaaaactcaggtgttccagctcttggtctgtgatattgctccagccgccgatgagccaatgtcggttgactcgctgcttatgagtgaacttgtacagacgacagaaattcctggtagtgggtcgtcacctccttcgtcacaacttggaagcagcggcaaacgttccccaggaagaccaagtactactggtgccgacgggcctcgtcacaatgtgattcagcaccgcgaagtgatccccgtgctcttcgtgggacgtggtagcggaaaattggaaatgtatcacgtccagtccgccaccaaaatgggagaaacgctcgtggatccagagaaaactacgagcctgtcatcgattatcatggtagacggagatggcaagcgtatcgagatccccgcgcgcaagtgggtcgaggaacgcggtggccagagtggactagatcctgccgatacacaagtttcaccgagcatgatccagccaaagctcgcacaagacgcaaagactgatgccagccaatcaaccgagcaagtgggcccacctagtgttgattttgagctcacccagcaacttgttctagaggccacgaaagttgcttcatcggcagctcaaagtggggacctgtcgacttggacacgggggaatgccatccaggtcaccgtcccggtaggatcgcttggactgcatctcttcatggaggtggatcagcacgctgtggtgaagggattcgcggaagacagcagcacggctgctttgctgtcaggcagcggggttcgtgctggtcatacgcttactgcaattaatggggtagaagtcatggcgctcaaccgagatgccgtatgcggcgtacttgatcagcttcgggagcgcgcaaaggtgctcacttttgccgagggctttgatcctaatgaagtcggagcctcgggcggtctagttgttgacacgaaagacatagcggaggttgaacgcccccgattcttaatatgcacatgtggcaaagcaatccacgtggtgctggcgacggtcccccgagcagcggagatggcgatgggcccgaaggaaatcccagctcagcctcttgcaagtattgaactgcacggtgctgttcttgtcacgtcaattgtccgagtgcccgttggcgaaggagtcgagaactgcctcgccgtcatcgaccagagcaaccgagtgtacgttctctccttgctttccctgaagccgatctgggaggcggagtgcaacaactttggcttcggactcggccgaagtggcctggtggacggcatcttggccgatatctcgtacggtggggagctcgttgtggccaacgcgttcggcgagatggagcgtttctcgctatttgccgagtcgacggcgatggagagcgcgatgctcgagcgcatgtctgtcaagacccgactgcatctgtctgagcgcgtcgccatgttcgaccaagcggcgtctccgtcagcggcggacagcggcaagaagcggggcatcgcggcggatgctggcaagatgttcaagaagctggttctcagcgtcacccaagaggccaccgacttgaacaaggtgttccagttctcagccgaggaggacgagcggaggcggctaatgggagatcgatctccagctaaagatgctgcagctgccgagagcgccaccgccaagacggagactgggctgaatgctacgaaggacgcgctcatgcaggcgcagcaggtatatagttacccctgaattgattgtcgagcagaatcatggtttcccttgctaacactttgtgtactggttatctgtagcggctagcggagcgcggggaaaagctgaacgatctgggcctcaagaccgagcaaatgaagaagacgtctgaggacttttaccagacgatgaaagctttcaacgagaagaacgccaacaaaaagtggtatgaattctaagcaaggtaggtaggcatgcagcctggcagggggagggacaatgtatgagcatgttatgttgcatccatctttcgaacgttcaaagctgcagttagtcagtcgaacttggcccaaacgagcgtgagtccttgaagcggtcacgaaatccaagcacgggcaacaggcgcggcatcgtcgacggcgacggcgacttgaggcgtcacactcgctggccatgccagctcgccgaaacggatgcgcacgacgacgacgtccacggggtttttccaaaacgccgagactgcgtcatgggcggcgctcgaacgagtgctgtgaacaatgccatacagacattgtccacgacctctttgacacgtgggagtgcttgcagatgttactgcagccgctagtggcacgctaccgcggacgtgtgcaggcgttgctgcttacactgcgtggcggagaggcactaatactttccacgtggcttggactcaaggaatccgtcgaactgccaatccatcacttgacacacgtagtcagcaatggcggccggacttgctgctcgagcgtggctgttcccagtaccgagcgtgcgagctgatgcccttgctctgctgcgtcgctaaagtttcggcgagtgaaggtgcaagtgtatgacccgccatcatttccacagctgagagggtcactcagctgtccagacactgccaccaaatttgtcgccggccggctggaatagtggcggttctccgttccaaattatgtgcaagctaaaccaaacttttgaaaacaaaagctgaattttacaacggaattttttatcgaacagaaaatggctcgagtgtacgataaaaaattcaggcgggtcggatgctagttgatgggtttcaccactatttccgggacggcgcataaacccgacccaggagagatgtcacctttcgagctcattgccactttcgccgagcgtcgagcacaccgattgaccgaccgaccacagagccgagcagcgccctagatcatggccaccgacaacaagcagctgcagcagcccgcgccgggcctcgaggccgagccgctgctgcccgcggacgtgcacgacatcgccgaggaaggctccgacatgacgcgcgacatcttcttcgccatcctcaaggagacgcaggacggaccgccgcgccccaagtcgctgcccgaccagagcgagatcctgcacgaggacatcggtgcgtatatagcgccttagatacactatcaatgctgtgctcacgcgctgtctgttgctgatggacaggcaaggcgtcggacatcgcgcggcccgggggattccggcgcgaccacgtgatcgccaacctgggcaacagtccgcacgtgccggcgtacgtgcaggactcgttcctcgagtccatccagcccacgccgggcttcctgcagtccgcgtacggagacttcatcgtggccagtctcggactcgcggacgacgacgacgactctgacgtacgtggcgtgtgacagatgtgctgcaagagtgggcagcacgtagtctaactgcacgtctgtgttgttgtgactaacaggagacagcaacgccgctgctgagtcgtgcgtggaagcgtcggccggagaagcagcagcccggcgcgaccgtggggaagacggtgttcacgatcctcaagtcgttcatcggtagcggcatcttgttcctgcccaagggcttccagaacggaggcatgctcttctcgctgtcagcgctgtgcgcatccgccgttttgtccaccttctgcatgctgcggctgacggagtgctccaacgtgctgctgcgcgaaccgggtcgcacttctgtgtcgtacggactggtgggagaaaaggcgttcggcaaggttggtcgtgtggctgtcaacatctcgctcgtgctctcgcagatcggcttctgctgctcgtacctgatcttcgtggagaagaacatcggcgaggtcatcttggccatcttcggggtccagcggacgactgcgtcctcatcattgacgctgcttgcgctgcagatcctgctctacacgccgctctcgtgggtgcgtcgcatcgaatacttcgcgctcacgaacctgttcgccgatcttctcatcctgtttggcctcgtctacatcatcacgtactcggtgcaaactatcgatgacgcgcccgtgggcactgcgacttgggagaacttcaactcgaccagttgggccatgatgctgggtactgccgtgtactgcttcgaaggtatcggactcgtgctgcccatttacgacgccatggacgatgacatcaagcacaagttcccgcgcatcctgtcgtactccatgctgttcctcgtgacgctgctgtccgtgtttgccggtctggtgtacgccgcattcggccaggagacacagtcggttgtcacgctgaacttgcctagtgcccaagacagcgtcaccacgatgtcggtgcagctgacgtactcgctggcactcgtgttcacgtacccgctgatgctgtaccccgtggtgaagatcctggaaggctacctgttccctgcccacagccagaagggctactggcgctgggagaagaacggcttccgcttcgcgctcgtgtgccttaccgctgctatcgcgtacttcggcaaggaagagctggacaacttcgtggccctcatcggtgggttctgctcggtgccgctggcattcatctacccgtgcctcttccactcgcgtcttgtgaacgagagccgcaccctaaacaacatcgttatcacggtgggcatcttcacgatgaccttcgcgacgtaccaggctgtgtcgacgtggaactgaggcttctcgtcttagattaaagcttgcaagtgctgctgttttatcgtgaaaagtccaacatcgaaacctggattgacctgacagtccattaaggaaatgctagtcgctatcgtagcctatacacaagtttctccacgtattccatacttacgcattcgctctttgacgaacttgctcgaccagttggaagaggttgatctccactgggttgttgaatccgctggggaggttggcgcccgccggaagccccagaagccggtgagcatcaaaccgcagcatggcatgctgctggtcaatgggcaaaacgggggcgcggttgagagcgtcatccacgggaaactccccgttcacacgctcctcgaattgaaactggcggatccgtagcttcggtgacagccgtatcgacaccacaaactgaacgccgacatgttcgcgccaaattgctgacttacgatccaaacctggccaaccttgacaaacgccgacctccacgttcaccgtttgaaagtccagccagtttccaatgccgtcgggtagaactgctccaacacaaacactgggtccaaagctgcagtctggctccgccagcaccgcacccgctggtggttcttcgtcgtggcaatccgtatacggctcaagatgctcgtcgccagtccccgtcgccaagcacatcgccacaatgaattttccggcagtaagggagtctatagcccccgcacactccacgatccaaattctcccgtcccgccactccatatacttgggcttcatcgcctggtttggcgacctgacgtagcggttccagtcatccactgatgctgtgcacacctcgatagggtccgggtcgacatcttcatcacgaagcagcgaatcctggaccccattccagtcgagactcctaattgcatcgttgatcacttcggtgctcgtctccatacctcactgtggctcaaaacgacagagatagaatttgactagattgatcggagctaacgtttcatgtattaaggtacggtgccagtcgcgtgcaatctgccagttccgtgccactttagcttcaaccaattagaatgccgtaagtatttttaaagaaccctattggtaaaaagtctgtaagcgctaccagccagtaaaacccgccaaactgtatacgaacaagacacatttcccgccagtttgagctcagtctcctatttcctgaagcctacaaaccacccaccaaccccgcagcgaccacctcgacaatgcccgcgtacgagatcgaagacctcaattctgcagtgaagcgcgtcctcgccggcgacagcgcccgcagtgtcagcgacagcaccccaattccgtatcggacccttacgaaatgggtcgcgaaggggaaaatgggcatcttccgcgcatctgttcgtcacggcccggctccgctgctctcgcaaccagcggaggcatgcttggtcgagtggattgtcgggcgccaactggtcggtcaccccgcaagtcgcaaggagatcatcttcaaagccggcaccatgagctccatggccactggtcaaagggttggtggcgggtggtaccgccgcttcatggggcgacacccgatgctggcaacccgaacgtctcaggcggtatgcaaggcccgcaacgctgtgaccaagagcgatctcgagcaggtttttagctcgttgatcaaggctgtggtcgagaatcgtttggacgcgtctcgcgtgttcaacatggacgaaacagcgtttcagaccaacaagggatccaagcgtgtcgtggcggttcgaggctccaagaacgtttggcaccaagacgttgcgctcaattttcacctcacgctggtcgcgtgtggcagcgcgtcggggtgcatggtgccgccgcttttcgtgctgccggggttgacagtcaagctcgaagttctagatggctgcgccatacccggagctgccgtcaccacctcgagctccgggttcatgaatggatttctctttcttgagtggctgagctttttttcggccagcgtgcccaaggacgtgcagcgacctcttctcctgattctggatgagtgttcgtctcattactccgtggagatcatcttagaggcagttcggcttggcgtgcttctgttgttgcttccttcgaacgcgacccacctgcttcaaccactggatgtcgctgtgttttcgtcgttcaaggcgaagctacaccgcctaaccgagatctacgctggcgagactggacgcaattcggtcgacaaagaggaagccatccggatggcaagcgcggcatgggtaggatgcaagatgggtgagaacatcaaagcggggtttgctgggtgcggccttttccctccgtccaagcctcgtatggacatgtgcatcgacaatttccggcgcaacggaacccccgcatctacgaagctggcagcgtggctccggatcaaggaggatgtgcagaaggaggtgctcgtgctaccgccgtccaagaagcgggtgcgcaagacagcaacggtcgccggtcgtcttttgaccaaggaaacactggaagcgatggcacaaccgatgaagaagcccaagaaggcagccaagacgaagaagcatccgatggcaacgaaggcgacgaagatgaagagggtgccgtctccggtgccggagcctgtgcagctgcagttccagtctgcgtcgaagcacggtgaggcaaaccagcaggataaagttgtgtgggaggcgatagttcagtataaccaaagaaaaaagcttttgctggggcaatttccaccacattgtcttcattgtttttgttgtttatttcctactttctatagtgatacgatatccctctgtatgcctgggcccgctgtgatgtccggtttttgagatttgacgatctcaaaccgttatcagaaggggaacccgactcatggtacttagcatactggcggtcaatccgttcactcggtggcagccgtcggtcgctttcgcagttctgtggcagccccctaatgctctaattgacagttagcccactagtcttttggttgagttaatgctgccaggtggaatcgaaccaccgtcctctcggttatgatccgaggactttaccactaagctatggcagcgctgcctctgagcacaaatcatactatatttatacacaaatcacataatattgtgtaccatattgtgatatcgtatatcctgtcttatacgatttcaaatggatgcaaatcattttgtacaggttgtttcggtgctgtcatgagagcaaaaagagatttgtcccccttacaaaaccacagataaaatgcggcagataactggtcctgccgtgaatgggtttgcaaatagtcagcaactcctaattgagctctcgtttactgtagagcccagtaaaacagtctgctaacagaagagattgcgctctcttcagatatgcgtttacatctcaaaactaattgcccaataaaagttatgagcaaaacagtgagcgggattacattaaggcacacaagtggcaccgtaccttacaacaaaaagtgatggaacgggttgtgcgttctctcatttctgaaaaatcaaggaaggggaagaagaccgcgaagaagacaatgaaaacgccaattgtgccctcatccagaatcccgaagaaagtgatcgcggcaatggtggctgctggcgctaagaaggaggaactggacggagaggacacaagaattctgcgaatcgaaagcgtgcactcggaagcgtggagtgtgtatgaacgctgggctgcttcacttggcgaggttagtccactgatgatagcccattcttcgccaccagcggacatacgaggcaccagcaggtgccctcctcgtgagatcgccattgagcttcagtttgaagcaacgagcattattaaccacctcgcggatggcattccggcaggtcccgttgaacctcttccgggtccagaggctatgatcaacgtccgaaacccgaaaattgcagtcactgcgttgataagcgcgatctgctgccctgggccaaccttcccggtgatcaacgggttggaattaggtcagtacatttgccacgtccagtacgtttggagaggtgtgcttgtcaccgtgccggtctttcggtgggatctaagggaattcactcccaggcctaagtttgagcagcttgcatcggatggaatattgttttgcgcggggtttacatgtaactcatacacttttcagttttcatgtaaatcgtctggtacttctaactagtttccaactgaattggcttccgcaggaagcagagggttccagcgcgaagacaggggtcagcaaattcttggcaattttaaaagtcaataaatggccacagcagctaaattaaggcgtgtactgatgctcgtccgctttggctcagtgatgcatcaatgcagtggtcgagttcggacgaggtctctgtggagcatgcgcctagcttggaggagctggcgggcgccacccagctagtgcacgaccccgacagctgggaggaggatgaccaggaagacgaggagtcccaagccgatgtgcactccgaagtccaattagatcacattccgctggacctcggcccaaatactgagaaagttgatcgtgcggcggttgatcgcggccccgccgctgacgtagagaacgaaacgcgggctgttgaagagtgcagtctgggcaccgccgacgaagatgctggccaaccttccgagcaaatgcctttcgaccagctgccgcacctctcgccagagccattgcaccccaagaagatctccaccaccagcaagttcaaagagaggcaggctgcgcttgaccccgcacctcaagtggcgacgctcttcgacgtccacccgctgctggaattcgctcgcacgcacttcaacctcacggcgccgagagcttctcctttccacaaaccggtcgagttcgacctcaccaagcgcctggaatgggataagaaggtcatctcgaccccgttgacgcgcctcccgaaggaccaggctgctatcgcagtgcaggcgttccgcaatgtctcgggcttcatggggaaccgagcaagcggcaagaaccagatcgatcactgcttcaagttactgcgcaacgtcgttccccgatcgcccgcacttaaggacgaaatctactgccaactctgcaagcagctcactcgaaaccccagctcgtatgtgtccgtccaaacttgttatctgaatccgtgctaactgctcccattgcatgctgtgaccaggaacgcagttatgaacgggtggttgctgttgaacgcatgcctcgtaactttcccgccatccgcgccgttggctgaaagtctcgagaggttcatcagtgtgcacatcggtgctggaggcgactcggaggctagctcggaagtgtcggcgtatgcgctggaagcactgacgtcgctacgatgctgcgccacgaaaggcgagcgcaaggaaatccccagtgccgctgagctgcgagcgctgcaacggcacgctcttaacgacatcactgtcatgcttgccgatggttcggttctggccatgcaggtcagcgcttggacgacaagtcgcgatctggctggactcgtggcgcgcaagttaggcgtgtgccacgaaaaggccttcgcgcttttcgagacgaatgacgagggggaggaacacctcgtgcccgacaatgagcgtgtcatggatttgtacgcggagtgggaacgcactcacgtcgatgtgaacgacctcaagcagaagaaaaagaggaagacaacaaaaagtgaaaacccgactggggagacgaaagcgccggaggttgaagggtatcacctcacgtacaaggcatacttgtgggtgcacgtcgacgacgaaactgcagcagacgtcggtctgtactacctgcaagccgtccacaacgtgctcagtgggcgatatgtctgcgatatcaccgttgctgtcgagctggctgggtatcaattgtactgcaagcttggcaacgacgcaactccagagctggcgaatctcacgtaagttacacaatatggaaatggttggagagttttgtacttattgctgtgttgtgcttgctgacaggaacgagatcaatgaatacatccccggtccgcttctcagttcgaccaatcgatcagcagtggcggagcaagtgctatctagctacaagtcgttcatgaacagttggtgcgtgcagtctacacaacaggctcggctggcttacttgaggctgtgtaagcgccaaccgttctacgggttgacgctttttcacgttcgaaactatcgccaactcgcagtgctgccatcgcgtgtcatcctggctatcaacgacatgggggtcagtgtcctaggcgccgacagtgacgaagtgttggcgatgttcccgtatgctgacattgccagttggggatacagcgcaaactcgttcgtcttcgttgtgatacgcggcaccgaagagacagagtactcgttcaagactacccaggtgagatgctcatctggatttgtacctatgatgcgatcatctaaccgaagttggctgagcagggcaagagcattaacgacaacgtggccgcttacgtcaactacattatttcattaaccactttcgaaagcgagtaagggataaatacatgccagcgctattggctcagacatatgaatagcgcgctgcacattgttgtgtgggtgtgtagctcaatagagtatctttgtttcgtctacctacgatggatgtccttcggaggtgaatcgattccggccttctgcagcagcttcgtattgagctccgcctccagtagtgtcatgccgtacttatcttcttcagccctgcgccgagcgtcttcggccatctgccgtttcaccagctgctggtgctcgcggttgcgttgattcacccttcccttcaccgcgtcctgctccttttgccacgtttggaagtccgccttgaacttggtggcgtagacagcctcctcctgctccagcgacagtctgcgagacctcttatcttctctttgcaacgtcaaggcttgcatctgcacccgtgcagcctctcgcttcttgcgctccttttgctccagcagctcagcttcccgagcgcgcacagctgcctgcacagcaagtgcacggtgctcatcttcacgcgccttctcctctgcactcttcacattgagtagcgctagcttgaccttctggttctgctttgtgaggatggcgtcgagctcggcgcgtcgtgcagcttcttgcatctctagcttcttctcgtacgccttttgtagctccaggtcttcttgctgttcacgaagcacagcctcgcgcttaagctccagctgcttcgcgtttgcctgttttacccgaacgacttcttccatatcggcagccttgcgctccgacttacgacgcttctcttcctcacccaacaggcgaaacctctcgagcgctcgacgctcgttgcgctccttggtctcttgagccacacgtacggcctctgcttgagctcgaaggtcgtgctgccagcgctgagcctccaattcgacttggtcttggcgctgcttctgcttggctttctcctgctcacgccacacggcctgttgcgccgcctggacgcgcgcgtacatgtctgcggtcgccttctcgtcgaggcgtctgcgctgcttgtcggcttcctgccgcgccagctgctcgcggtacacggctgcagcagcgagacgtttgcgctcggcttcctccttggcctgttgcacctccgccacctcctgctcgaagatctgtattttgccagtcgcggtgatcacgtcacatgtagtgattgattagtccactgtttgatgacgcacacgacagaaaggtaggccacttacggggacccacaggtttggcggctgcttgcgcggaggccgccgcacgggaccgaagcgctcttcatcatagtcgtcgtcctccccaccctgttgcttttgctgtgatgaccggtctttatcgtcgcggttgcctgctgcaggtgtccccgacgtctttcggttgttgcccgcgtgctgcggcgcaggacgcgtctttgatggcaccagacgctctcggtgagctacacgcgcgagttcttcacccacatgacgcaagatgaggcgacgagaggttgcattctgcggtgcttgacagtgcgccttgatctcctgcacgtacacgcggtttctagcctccagctcttgctgggcctccagcgccgcggcacgctgctgcttgacggcgcggctcttctccaccagcgtgcgctgcgccggcgtcagcacgagaccgcccccagctaccatcgctgatgtagtgccgagcagtaccagtgcagacactctaggcactctataaacagcgcggcaagccgctaatattggcaggtaatgttgggccgtgcttcaatcaatgactgggaaggtacagtgctggcattgcattgattctagctctcgctaccatcgcgacagatttttaaaaacctgcgatgaagttcaaatcttcttttcagctgatcgtgcactgacaccaaaacacgtacggtatcccggtgttagctgaaggctcctcgaacgggtttcggaccaatgcctctgactcagctggcggccagcacgccttaaacttcttgttcatcttcctcgagagcagtgtgacttgccgcctcccatttacacttgaaccaggactcttcagaaatggcgcagaggagactccgaagttgttggcatcctcgttctgcccatgaactcgtgtctgctctgggcgttcctcgacttctctttcgctggttttcgacaccctcttcacagaaggctgtcgctgcaacagtgaatcggatgacgctctgctcagtgctggttggatcggagtcatgctccaaaaactgacggagcgcgtcttcatacgcagcataccgccggagcgacgcctggtcgtgtcccattgcatcaactgagccagttcattgtccatgagagcaaactcgagccattccgtatactgaagctggcaatctgatgtcgccagcgtcagcaacttcgtgcgaaagtgccttcgaagcaatgggcttttcgctgcatcggaagttgaatcagcgagctcacgtcgccgtggctcgtgtactcgatggccttcagcgtctgctaccatccgatttgttaatagacagcacagtaaatctgaattacaagacgtgttagcaaaccaccgaggcctacaaattgacgcaacgtactaacctgcaagttgttcgatgccttgctgatttaggtactggtggtcatggtgatctggaatctgaaaaagcagctgagccttttcttccggggccccgcgacttgcagccgatagaaactatagcaaaccatcgcatcgttacaccgctgcacatactaaacggaataaacgataaaactaaccttgatcaagttgtaaaaggaaacgtttccgtagccatcgggctttagaaggtaacagactcgtccaaagatatctactggccactgccgataagtacgtagagattagatatacatcccagatgaacccaattgcacagatcatattcccaaacgtaccgtgctaaactccctcgacagtattccctccaactcttcttgtcgtaaacctcgcaacttggatcggccacagatcttccgttgaaagcgaagaaatgtaaactcgtcctgcagccgctccatctccaagtggctgaagtgcgtctgcttagcaagaacggcgaattccgctttgcgcagctgaggtagccggcgaatcgctgctctcatgtcttccacagactcatctttaaagccgtagagggtccgggcctgctgaagcaactcgtgtggagaaatctcagtggccgtttggcactggttcataatgatcttgtagatataacttgagtcccactgctccatttcctacgataatgacgacacgatgagcctacgtggcagcaacttccccaaagcagagcagcgtaccatgtggagttgaatctcgtccatcgcaaggcgaaaaaaatgcagtgcaaccagtaaatggagtatggtgccgtcatcttctcgaagcatggtgtcccatacctcgtacagcaacggaaggggcagctcgccgacccagagggagacgaaccatttgcaagacagcagcgttgccactagcggcaagtccgcctgaaaacatcaccaactatgaagttagtgctaactaccagcttacaacatgcagcctccatgaactagttaccttagccagtatagggtaatgtggcaccagcttcctcacgactagctcgtggtacaatttgcagtcctatcaacaacaagccaccgcaaagggtgtcaaccgaaaagaaccacagtcactaaccatgacacagaacactcaccacttgaaacccgtgcagcttcggtgtccgtgcgaaaaagtcgtcaggaaacactctgtcccccccccacagcaccaacaagtcagtggttttgacttcaccccaaatgaagacaccacgctccaaacctctcgacgacactggcatagacccagaacgtttcctcctcgtccctcttctcattgacgttccccagcaagaagcagagcacgtctgcgtggccctgcacgtagcccacacgagggtttctctgcaaacatccagagacacacgaatattaaacaatgaatgttctcttctcactaattattagcagctgcgtggctgccgtaccacgctgtaggccgcgagtatattcctcaagagggggaggaatcgcttcgtcacttgaggcggcagctcctcgtcctcgtccagcgcctcgcgctcctcgggccgcagcaggaagaggcgcatggactcgcccgtgcgcggcagatccagctcgatctggcgcagatcctcctcgaactggggagacgcgcactgctcgctgcggcgcacgtactcgcggtagtcgagcgcgctgttgtcccggagctcgcgcgcgcccgacgtcgcgaaccagtcggcgggcatcttcgtcagctctgcgtgagaaaccctaataacaatgtggcaacttcaactttgagtaaatgtggtgtagcatatagggtaatgagtacattagggtttgtggaaacgctcagatctttatcagtcttcttttttggactgagaccagcgaagaagagggaggggaggcgagcagcatgtcgtcggttcaggtggcgcccacgcgcatgtaagccgcggtcaactgcctctgctggttgtgtacgtatagtgtgtatcggggtgctgacgctggtcggctggttggctggttgcagggcgctgacgatcttcaagggcaagcgtgttggcgcgaagaagggtatcttgagctcctcgcctttcagtctccttttggtcgccataaaccctaagtccattgcaactttgctgaatcgatgtagggtttgagctgctgaagaagaaggcggacgcgctgaagatgcgcttccaggccatgctgcgcgagatccagaaggtctctccttgactatcggcttgacttgacggagttacgctaattggcgttatggtgctgcgagcagaccaagatgtccatgtccacggaggcgtccgaggcctttttctcgctcacgcaggcgcagtacgcggccggcgacttccgcaacaaggtcatcgagtcggtgagcacggccgagatccgcacgcagaaccgcatcgacaacgttgccggcgtgaagctgccggtgttcacggaggtggaagtcagtcgcgagaagagcgagaacattggtctggccggcggaggtggcaagatccagaactgccgcgagaagttccgcgtgctgctgcgtgcgctcattaagctcgcgtcgctgcaggttggtgtgctattgctagggccaggagaagctggaaattgaagactgatcgtgtgtgttgtggcaacagacctcgttcgtgacgctggatgaagccttgaaggtgaccaaccgccgcgtgaacgctttggacaatgtaagtgctttgagctgttagaattgatgatctgccgctgcatatttgcttctcgtgctgatatcttctcttcatatctgggttaaatatgatgcaggtgacgattcctcgcattgagaagaccatttcgtacattacgagagagctggacgaactcgagcgcgaggactttgtgcggtatgtcaatgacctgtacatattgtaggctgaattgacccaagcagaatgttggtttcttaatgtttttgatgcccgtcttctttgatgaacactgcagtatcaagaaggtgcaggcgaacaagcaggagcaccagaaggcgctgctggcgagggaagctggtacgacacaacgtggttgcattacctttagcagaaacagcctaacctttgcgcattgtggtgctgctttctacagccgagggtgccaagacggacaagcctgcgtctgcctccttggacgacgacccgttcgcggacgttgtggcgtcggaccgcgacatcctcgcccagtacgagccgtctgccgacgcagacgtggtgttctaagcgagagaaagagaaggaagtaacgggggctgctggactgtgagtaagtgagggtcgttctgcccatgagtcatcgggctgtaaaaaacttcaacaataaaagttcatgagcccgaatccgccgttgactggatttcactatggtcgctccctatccctgtgtcattcgagttcctggccagtcgtagagagcaataatggagcccatcgccaagcgcctcaagcagtccgccgagagcgccctgcagcagaagaagaaggctgaggaagaggaggacattgcagaccgtatcaaacggctggaggcagagcttcagggctccggcagcgaatccagcgactcggaagactcggattccgactccgacgatgacaatgacaagaccaaggaggctgcagtcgtgaacctctccgcctatgcgtccgagcgcattgaggcgctgcccgagagtatgctaccggctgcgcggccctcgtccaacctgccgccacccaagaagaagcgcaagaagacgcagcaggaggagaacgagcgagccgccaacaaggcgctcgagatgctgggagacgcgctgacgttccccaagaaggttccgctcgcctgcaagccctgcaagttcatcggcaaggatctggaggacttcaaggcgcacaaagcctccaaggagcacttggagcgcgttcagaccggagacaagacgctgagctgcgtgttgtgcaacaagtcgttcacgagtcccgcgcagctcgacgagcatcgcgccggtaagtggcacaagcaacgcgcgcagcagaagaaggcgcggcacacagtgaaagtctgctacgactttatgcgtggcgagtgcaagtggggcgaccgctgcaactttgaacataccgagaccaaggccatgcgctccggacgcgcgctcgacaagacgcgcagacgcgtgtgcgataactttgctcggaccaagaactgccgcttcggcgacaaatgcctcttctcgcacgacgccaaatagtaggaagggtcctccaattgatagaaatctaaccagcacttgttgcactcacacccttaccagcttgtcttttgctccaatgcttcttcatatcagagactatgcaattcaaggcttggtgtctacagcccaagctgctctctgatgaatgcctccacacgctccagcgtgaattctccgtccaaacggcgtgcgacgtctacgacggcctcttgttgctgctggccgcggcagatcaggatcaccgggagatctgccatctcgatcgaggcgtctgcttctttggccaccattgctgcgaacttgtcatgacaacacaagaagcaattaatcatggaaacattcatctttgctttaatttgggtccttaccttgatgtggacaagctttcgtgccagaagctcaagttgcgtgttgagtagaccacaggcgtagttctccgagtgataaaggtgcacgaccatatcgttcccaggctcagcgctctctttcttcgaggtgagggccacgaactcctccggtgtgatgaactcgagctgtccaaagaccttgcgcttcttcaccgcttcttgcatctgcttgacgcgcagctcagcgtactgcgccaagaaggcgtcgtctaccaggtcgctgtcgtcgcattcgcagtccgagcctccttcacacttgcactccaaatgtgcagttggatcctgcgttgcagcagtggaagagacggtggcgcctttggcgatgcggttgagcactgcctgacgctccgcttccttcctcaagcgctgcgaaccacagcagttagcgccgtttagccctgctcacatatccccgttggtacagcgagcgcacctcttccttctggtggcgcttgtgtgccttgtagtcgttgatgacccccttgggccccgtgttcgccgaggcgaagtcccgcccctttccgccgcggaagccgcgcgtgggcttcccccacgtctctccgtccacagccttctgtctccacggtcctgttgggtccgccactgagtgcactcgctccgtgatctcttcctcgtcgtcgctacagcacacaagatccaatagacatacatcagattctttgccaccccgaagcgcaagacgtggaacgacgcacctggcctccgagtccgagttgactcgaccgcccaactcgtccgagtcgcggtcctggagcacgttgtgtcgcaggaagaacttctccatcgtcggccagatcccgctttgctttagtgtcgctttggttgcgattgatacggtgccgccagggaaaaaaatggaagaagatcggagtacgacggtggacgctcgtccagcgtggcattcgtctgcaactgcaacaagtgttttgagccttgcaagacgttcgctcccagcggagaatacgacccccagctggcacgaagttcttttgcatccacgttgcacggaatggagaacaccaccaactcgtcttaagcaaaaatgcacattacacagtccatgagaaaagagtcaactgcactgcactgcgctctacagaatgcttccttcctccgaggtcgagccgacgtacggggcgattgaaacttgtctgacttggtttgtcctgcacgtcttcgtcttgcttccctgtcggctgaaaccccctttgggctgtctgcatattcacttctgctgctacgtcttcttcataaacctttcgcttgtgaggggcgctggtaagctgaatctcgatgtggaatccgagcctatcgccactcacacctgactcgacccagagacgcttccctagcttagcccttgcccgactgcttcatgagccactggatgacctggtcgatgttgacgaggcgcagcgcagagatggggatcaccagccacgggttgtccacgatgtagtccaggttcagctcgcggatgagctcgggctcggagatatgaggctccagatcgatcttgttggccagcaccagcagcggcgtcgtcgccagctcactgaacagcacggcacaaggtcaacatacagctaagacaacagtctccaagccccagcagcagcgtaccggtcctctagtaggcggtgcagctccttccgcgccagggagatttggtcgaactggtgcaaataccacagccacagaaggttaaaacaccggaatcggccgcctaattgccctgcgactgctgaagcgtaccgcgttggcgtccaccacatatataatgacgtcacagccgcgcgtgtagcggccccactcgctccggtactgtgcctgcccgccgatatcccagcacttcatctgtacgcctcccttcttcactagcttcacgttgagaccgatggtcgggcacgtctccacggggtggcccatggccatgacgttcagcagcgtcgtcttgccactgcaagcccacgacgtagcgcgtgtgagaagagagagatccaggagcgtagccacagaagcagaggaagaagacgaagacgcacctgttctcgagacccacgagcaccacctcgagcttcttcgtgtagaaggcctgcagcatcttctgtagaattcctcccatggctgtcgctgtgcttggctgtacttgagtgtcgcgtctaagagagtctaaagcctggctggagctggctggggctgtggatgactcgacccgctcgcttcttctttcgttttgaacaaggggaaagagctgccatctgacccggtttttgccccctcgactgatttttctcgtgtggcgcacgctaagaagtgtgtggtatacacatatgtatccctgtcgaacatgatcccttcaagcaggtaaatgggcagttcgaaaacttcttcgtcgcgtcatgcggttgcagctaggagttaccacgcacgagtgtacagcgcaagtgtagccaatgcaatgataaaaccgtgtactcgcgcgttttacaagtggctgcgtacgtcgtggacctcactttcacttttgcgaagcaagcagtttttcgattttcaagcaacggcccgtagaaggccgtgccgcgaggaagttatgccaggcgaagcagggcaacaatgtgcctacatcgtgacagggtcatctgaaggaggaccaccacgcctgtaccgggtgacggaagacacgtcgggatttaaggagaaagcgaggaccgattcgagtgtgcatgatgaaacccaccattgcagcaccaaccagctccggatcaacttctgcatcgccaagattctcgctgtggctctgtttatcgttggggtggttgggttgattctcgtgtttttcaatggcgatggggttcacctcttttccgtcgatttcgccgacattagcgatgataagcgcaagaagctgctcgacacgtacaactcaagattcagcaacgtcatgtcaggcatcaataaaaccattgagattgccatccagccgttggtcgctgtcggtattttgtgtctgggtgccaagtggttcactagcaagagcgagttgaatctcttggtggggatggccccaacgcttatcggggctgtgataggattcttggtatgcaacggaccgacctcagtcaatgttcagctagttcctggagaaccacaactatggatgctgacagaagatattcacgcggtgtacgtcacagcacctgacgataaccctcatcactagacgagggggttctcaacaactcggcgttgaacaccatgctgcgaactcgttatataccggtcgaagacgtggcaactacgtgcaaggggatgtcgttccgattgttcgaactgtttggactgcagatcgagcttccccatgtcatttttggttacccagagagacgttggcagcttgatgcccttccctcggcgatcgaaccgaaagtgaccttaaaccttcccattcgggatagtggagatcacggtagtgccagtaccatggatgcagacccacttgcacctcgaacgctgtatatcatggctctgttcgaattatttgaaaatcttggtggaatgtggagcttacctactcaccatacagatgaccctggcgctttttacaattttgtgaggtggagtcgagcggctgcaatgaatttgacgaccaatgaaacagaattacatgatgaggtataccacgacgacgaggtgatggtgggtgagatgatgggatttgctggggataactttgtcccagccatgatgctacacgatctgctggggaatgcggcgaacatcgttgaggaagaagttgaggctgtctatcatctacaccaacttgcagacgcgcttacttatacatcacttaccttgaaaattccagttcgcacaacagacgccgcacgcgagaaccaaaccattccagtctcggaaaattgcggctcagacgggtgtattgtcgaaatgcgaccgagccgttcgtcaaagcaacgccgttatgtgaagatggaagcccaagttccgatggcatctctggctgtaaactcgtcatctcgtctctgggaaaacgtattagcggagacgagttcaacttgtcgtccaccgacgggaaggcgactatcatggtaacggggctacgaacaatatactcgcttacggttggaattcttaactggacctcagagaatgtggcagccttttttggagccaaatgtgctgacaaagtgactaattgctctagagtccggctgagcacggagtcgttgcagtagaaaagcaaggtattcctagcgagcgacagcaccaattcgctggacgatgagtatgacattggagaggcttttaacacccctctgtcatcgattccctgcgaccttttagtctggcaaaagctggtgcaagtcgacagaagtttaccgatgctgcttcctcgtaattttgcttatgttgacgaggcagcaagggattatcttcacgggatcactaatgaatcgtgctcgagccaagccgacaaatttctcaagaacaccgtgataaatcatttgtttgcagaggaaagtctacaaatgagctacaccgcgggcctccagttcgcgttcaagaacggcgtcctgcacgccattgatggtagtgacttggcggggaacgttcaccagtttaagctccaagtgtctattccatctaccaactgtattctgtcgagcgtaggttgttgcgtgctggttgtgcttagcctttcggtcgccgcgccgcacacccacagtaagtccattattgaaggcaacagctcagcccccgtccttgctgaagccatgacgaataccgacaagtttccacgctccctgctcaagctctcggtggaacaacgtgatacggaagggacccaagcgcgcctagtcgaactggatcaggtcgaaatggcagcggcagagttcgtcgagaaaaaacaaccaagttaatccagcactggagaagtcggcaccaacgcacgacttgacttcaatggatactctgcacgaccaggaaaactaataaacaaaacaatgacattcgtattcataaatacccccgggtgcaagacaatgcctacattcgaacacatctgcacacacacacacatataatgactatcctcttgaagttccttgtagaacgcgaatattcccagcctccgagtaccctcgcgcccgaatgcgccgcggcgagttgtcggatagacgcaccgacgaggacgagaagcgcatgtcgggtatggaagctgcgcggaagtcgatccgatcctgtcgcgtcttgagtggccccatttgcatcgctagggtggattcggcaacgctgtcgggagcttcactgactaagtcgagaccgaggaatagtcccatagacttgtcgatgtccaggccgtggcgaggacagtggtgagcgttctgcgctactatctgctgtgcaggtagacgcgactacttgagctgctccacgaacgggtggcacgaggcgcagtcgcgacattcgagcagcaatacctcgcgcagccgcttgaactcgcggaggcggcgctccttccggtagatgtcgccggtctactggtggcacgtctcgatcgcacactcgaaactcgtgtaagttaaagttaagttgctcgatgaagcaaaggcagcgtaaaaccgacatgacgttggaggagtggcggtagggcaatagaaaccgggatgtcgtgatacagtttcgatgcattcaataactctggaatatacagggtgatcccgcacttccgatgatgtcatgtacaaaatgagttgtgtcttatcgcttgagcgatggtaggcaattcaaataatgttgagtggcttgggtataagatgtacacatgttttatagctaggaaaaaagatttttgagtaaatatttttcttagcggttaacaccgatagcactcgtgacatcgctgctcgtgacatcgctgctcgtgacatcgctgctcgtgacattgcctcccggctaataaaagtgcaacacgcacggaatgtgggatagaggcttgcatgttaatgttaatgacaaacgtacttatatcgaagtcatccaatacttgcatgtttcttataccaagcgcaacacaatgcaacacacatgaaatctagcattcaaaattaaagacataactgcacaacaaactaataacggggctcgaggtcgagcttatccaagtcagcatatgaatgtccttgcaaatatcgaggatgtcctgatggaatatttgtcccacgtcgccgtcatggcatatgcggttccggtcgtggacgagcggcgtttaagccactctgcatggccggtgtccctctttttcaggttcgggacgatgtcggcacgtttttcccgtcttgtcttggatgcagctaagagaacaagaaaacattcatccaaattaaactacaactacatcgacaaaaccaacatgatgatggcaaccagtatgttgttgcgcaaattcgtctatccgacgctcagtaggggtacaatcaagtgtacccattacatgaagagtgacgggtgtcactctcccgagtacatggtacatggtaccagaagctccgcaagccaaccatttgagtttgtgtaggcttttatatagttaacttgtagtttgtattacgaccaagttaacctctaccaaaatacagtcagtcttataacctactcctttgtagcaaaccgttccctttgaggccgggaactcgtgaactgttcacctggatagtaatatccgcacgctcttcctctgcgcattgtgctgtgaccccgtcacaatcacagcatccatcgagagaatccacgatcagcctcatagctcgaacttcagcttctagtagcctcgctgtgtggtgcttagccgtcagctccttcttcagcttctcgatttcttcttctgcacgacgatatttctgctcccagtccttggcggtgctggcaaaagcttcgtggcttgctagcgaattcttcttgtcggacaacttttgcagaagtgtttcctagtcccgcatcctcttttcgtgagcttgcttttcgacggccactttgtccgcatgatccctttcgcgcttattaatcataaacctctgaacctgtaagcgctgtcactccggttcttgctcttgagcttgcttgtttagtttagcccgtagttcctgctgttctgcacttatcttgttcaactcaaattctctcgaatccaaacgaaagacgaaactgttcaagcgtgcttccttgcgcgtcagcttcgtcgcactagtctccaccaggattcggacagcactttttggagtcgcatcggcctggattgcctttgcttggcgggcttcttcctcagctttctcgagtttcgaattcagttggcgggatacttcctccactttcgtgaaattcactttgagttcacgggtctcctgctctgcctatgtaagattcaccttcagtcggcacgcttcctgcttcgcttccgtgagttccaacttcaactcgttttctttactctgcattgcagacagagtggctcgaagagcggtagcagacgaccgttcagcatccagatcctcttgaaaaagcttagaatctccctttaaccggatattttcggtagcaacagcatcttcatgtttttccatgttgctattagctcgctgctgtcgtgcctgagcttccagatcttgcaccttcttctgtaactttggcatctgctctccgtgctgcgcagcgagcttgtcgagctcttcgttccattgctcataggtcatatagtgatttccagcgtcaatctcgcgctgcggctttagagcctacttgagctgtccgattgcgtagccttcctgagcttgcaattgctcgtgaaaacccttgaagttgatgaaattttaggtctccgatgcttgcttgtaatcaacttgacggccttcgtttctggttgccttgtaacgcttggcgaggtagccaacttgtgacaggctcaggtaaaactgatctagctttgtccagcgaccgcgtcggcgctttccagccttcatccgttcgtgcatcttctccaatgcgtcacgagcttgtgcaacctcgtccagtgtcagttcccagggcatcggttggcggggccacatcagtggtcatccttggctcggctggatccgatatgccaccgatggagccatgggcagcagcgctggcttcgccgccactgctcggagaagtcgcaacaccggcacaagcgcaacgttagccgcttgacgtgtccttggaggctgcacggatttcggtcctgttttagttgcgtagttgcctgacgatcgtgacctggttgccctcttgccctcggatgaggggctactgccgcttgcccctgacgttcttccactcttggaggtagcagcagcttctgccgtcccaggcttgctcagggttcgtcgtttacgcgccaccggctccgagtcttgattggacttccgcttggtcccggaatcgcctggagcactcacttgacgagttgaggttttggctgctcgcttggcgtggctggcatcctgttcggtatctgtcgctatggtgatggaggcggctgcacttcaattttagggtgagtagcgcgtgggctaacaggcttacccaaaaacactgcgaaaacgaatagtctagaacccgacataaagggatatgactgatgggggtgagaccgctaccgcctgtgcaggtactgcatacttaaccgatggtagtggtaggatgtataggtataacaagagtacctgtgcttaaatattgcatgcatcttccgccaaaccctctaaaaagctgacgtgtcggttttggtaggaaaaacaatcgctgcgatttatatgtcggtttatgccagaaaaaccgacattagatttgaatgtcggttttgaccagaaaacagacattagatttgaatgtcggttttgaccagaaaacagacattagaattttatgtcggtttatgctagaaaaacagacattaaaatggaatgtcggttttgaccaggaaaaccgacattagaataacatctctggatagcgtggaaattacatcaagagctggcaaacaaggattttgaattcgtattttagctcttctgccttctatgttgataggttaacagcaccgttggaggccatgattataatcatggaaacgtacatgatcggaaaacatgatttgtccaggattggtaagaaacatttcttaccgagtgagggagaaacagcgcgaccaatttagcacttgcgacgctcgcggaggaggcgaatgcgatatattctcgttctgaggaggcggcgtttccaaatcgaaggtttcccgtgaagatgccgagcaacgcacgcggaagcggccaaggcagtgagacctactgcgaaggccaaggtgaagcgaaacaggatactggacggcgagagcaacgacgctcataccgcggtccggggctctgcatgacgccaacttcagacgcgaccaagagcacgctcgacgacggagaagggtgtgaggacaagagagagcacgacaatgagcaagctgcgatcaagggtaactctgtgggcagtgatggcgatgatgagtacgatgctgcgggggctactggggtcctgcaagtggggtgtgcgtctagccgcgatggtgatggccacgaagaacacggcggggacgacagtgcggcaatctctgaaagcgtggagcctcctttgctctggcacatagactgggctgcatggaagatctatttggctgagtactgcgagcgcaccaagcaagtgttgcccgtgaaagagaccctgtctcgtgcagagcgtatcaagcgcttaaagtgtactaagaaaggaaaagaagtctctatgaaagaaaacgatgactccctgttgctccccgaggcgtttgacccgtatcagcggacttatatttgcacccacggttggaaaaagaggaagtcacgcagtgaaggtagtcatccaaagcagcatatacggttgacggattgcccatttagattcgtggtacagtggaaattgtcaaggggcgagctgcaagtaaagcttggatgctttacccacaatcacccggtatcggctgctgcctacgcgacgtatccgacttctcgtggagttgacaatccacttgtagaagcacgtgtggaaggtatgttggccgtaggtgcaaaacgcgctcgaatctacgactatcttctggaacatgatcagaatgtcatccaagttgatgtggataacatggtgcgtgagcataaatcgtcggtgtcacgtgttgacgataacgaagctactgcgagagaagtcgcgactttcgcagcagctgatctagagaacgttgcatctattgcagatactgatgcaggtgaaacgggtgtcatatcgctggcgagtgcacacatgcgccgtgtatatggccgatttagcgaagtgctgctagttgattgcagccacaaaacgaatcggtacgtggatttgtctctctactgagactatgtaacaatgatttataacgtgccttacctgtcattgacgtcttagctacaactaccagctccttactttcatggccatgaacgagttcggcgaaggcgctgtggtgcagcagtcgctgctcgaggcgaatggagattggcacatgcagaaagctatcgcccactttaagagagcccatccgactcggattaatttggtgcgcgttatagttgtcgacaaagatctgaacgaaattcgtgtccttgaagctcacttcccagaggctcgcatcttgatctgtcacttccatgttatcatgtatctgaaggaaatgcgatcgaaatctgattttgggaagatttctgctgacgacgcgagccaagtcgacgcagcaatccacaaaatggtgtatgtgcttgggaagaagactacaaggctacgcacaaaacactgaagggtttgtgtgaaagaatcggtctgacggggtttttcgagtacttcgagaaaaattgggattcatgccaagattgttgggtgatgtatcgacgcgcagatctgccacactttaacaaccataccaataatcgccttgaaagcttttttggaaagtccaaggatggagtagacagctccctgagtatgtctacgtgcgtgaaagctttggtcgcgtatgaccgtcgaatgcagaacgaatatcggtatcggctatctcgaattggccagttcgtgaacagcaactatgacgaagagatgtccaatgtgcttcgctttactacccactatgtagccaagcagattgaacagcagtacgctcgtgcattggacaatgtttcaaattacacgtttcgtaaagctcacggcgacccgagtctagtcgtcgtgtacggcacctcttctgagtataggcttagaacggacgagtggagatgtgattgtgggttctcgttatcaatgcgccttccgtatcgccacgctattgcgtatcgcaagagcgaaaatttagctggcccgctaattccctggagccatatcgacaagaggtacgatcagactgacatcacgataatggtatatcctaaaaactcatcggccaattgcacttgcaggtggacgaactcagaccggaagctggagaaggtcagacagttctcctatgagcagttcaaagatgccaactcgggtcgccgcgagcaaagagtgaagacgcacgcggagcgctacagagaggctgtgagggccacacatctgatcgcaactgagatggcagatattgatgatgaaagcgagtttgaggagatgctgcagttcgtgctaaaccaatggcgcaacgtacaccagcgtaaaatcgccggttttgagcaattgtgcgtcgatgcggtttccagtcatcacgttcaccaccaccaaaacgcaatagatgaggatgcggaagccaaacgcgaattcgaaattagttcaagcgaagaatccgatcagtgtctagaagtggagaatatgtcatcgagttgtgatgtgactggatttagctctgtgcacgtacgactgaatccaaggtaggggcgccacgaaaactgaaatccacaacggctgctggagagaaaggtgatcgaaaatggttcgaagccgctgaagcggggcgtaagtgtgcaggagaagttagattagtggggttgctgtctgcgctggatcgtgagcgcccaactcttgtagaaactcagcggcgtctgtccgggatcattgtcaagtacagcgaggcggctaccaagaatccgaaattcaaacgcatgaaaaatcccgtactcatcatggacgcgttctacattctcccctcaaagctggtagaatcccgtttaaaggtgttccccctctctaacactaaagacaccgccatagccgtggacgttagcttggaaactgacaccaaacctcgtagcaaggaaaacggagacggctttattgatacggttcagatcaaagacgtcgggaatttttcacgcatgcagatcgagacgttcaagaaagttcaagatctgaaggaatcggtgcaactcggagtggacatgcacaagtggctcatcgaaaaagggactgccctcattgcctgctaaatatcacgccttcgcgaacaaagttgcagctgacgtgttatctgcgtacccgcgcaagcaaatcgacggccttcccaatcttcctgactttgaagacgctatgctttacagagcgacaccacccatgtggcttagtgatgcatcaatcgcggcgttatgccatcgactacaggatgattttcctacttgcagatttgctggatttcagtcagctattccaagcaaaactcgcacgagacgcagtgacgcggacctaatcgatgtttcgatccacgagcgtgttctacagcaagtcaatgcatttgaggtagacgtcgtgctgctgccgttgaattttccgaaggcacactggagctgtatgattatcaaggtgacggagaagtgtatactttactacaatccgctgaaccaagtttcctacgtgaatacagcgaaagctgttgccacgcagctgaaattcgaggcctgcaagattacactgtcctcgctcagtgtaggccaatccaatttgacacgtttagctgtggtgtatacgtctgctggatgtttatccaccaggccgtcggtgggagacaactggacatgagcaacacctctctgacaagacgccgattcgagttgttttactatttgctatccggtcaacttctacctctgcaggatttaatgataccggatcgcatggaacacgacgacaccgaggaaaaggtacccccaccgtccgaacatggctacatcgatgacgaggaacttcagccgtcagagctcgcgcaaatgctagtgccatgaccacgtgccctagaggattctcaaagcttagcactatcgccacaattaatacatgtaagctttgcttcagcttcgttagagctctgctcattgagacgtaacgattgggatgacggcagtcactctattttccaagtatcaaacaagtatttgcccatgatttctcttgcagtaattctgcaaagaaaggagaaccacacgaagggtatcttccgcatcctcaacgtatcttctccaatcttcctcagatggtactcactttagttaggaatcgctcgtccaggattaatcctgtacatcgtcatggacgtgtccattactataatcctggcctccaacacctgccataggttaaagtggtatggacgtgtgtgtttcactttcgtacaggtgatgaagctcacaatcaacaacgtttcccgctacacttggagcacatcgcttagtaccttgacgagtagctatcctaggttggatgagtagtgcgcaacgtgaaaatctagacagattgcggggaatagagtacgttttaattaatggcaggattaggagactgacaatatgaattaaaggcgtaaggaacttgaaacccgcccattatcgtgtcacaacttgttcaacgccgttaattctggtaaaaatggtgctgttggcggctgtggcgcagcttgccgtcacgcgtcgtgaaaacgtggtgacaagtcgggcactgttttgtttttgaatcgaggatcattattgtcactcagctatcagctaacgactactaaagactgggtcctcagatgtcaaaccttgtcatctgaagagtggggttcctacacttcgtatcgcctcaatcacgtccgctttactcaacgtctgcctcagtctcttgcgctcctacatgaaaatatgcatccctccaatgggttatgtcgccgtctaaaagacgagatacatccgcccatggagaaacctgacaagtcgggcactggttctcaggagctcgcattgcctcggggtcgagtactgccaggatttctgtcgtgttcgggttgtggtggtattcaggtggtacgaggtagcagcgtatgcgaatgttcatcctgtcgtaagcggccccactgtaaatgaactccccacgaaacacgagcacatctcctcgattaagctcaatcatagtttcctccgacaagtccgctccgatgtgattccacgcaaatcctcgaaacctagtgccattctgtagtgccaggagcgtcgagcccggcacctggtgataattccaaaagtcgaattgatccgcggcgttgaccttaaagtcgcggtgcgggacttgcatgggaccaccagcatacgacttcaaggctttccatccttcttctgcagcccctggaaagcgcgtctcggtgagaggatgcatctcgcgcgtaagcctgtcaacaacgtgggggtgggggacaatggtacttggcgccgatacggatccatgacctcgttcctctcgaaaattggctgaaatgggagagatatcgtaccgacggactaagtaattgaattgcatgatattttatcagtgcactgctgtgtaataatgaatgccagttcttagatgcgtctcacactgtctgcatattatgatttatggataatatgtggtgtctgcattgctatatggatctgaccatggcaaataaagtataaaagcctctatactggcactacttcagtaacggccatggctgcaatggccaggctggagataaagttatgatttcgccaatgctacggcgtcgccttgtcgttgttgggttcaaattcacttgcttgcattaagaacctaggtctgggatggctggtcgcttaaatctgtgaacggaccaatagggtacggcatgcattcaagttcgtggtcgttaaaaatatgggcggaccaatacagtgtgaggggcattcgttgaaaccaagcctttcctcttgcccttctaaacatccatgtgaggaaaccagagaagttcattccgcggttaacgtggccaacctctggttgtcttgtgtagcaaggcagacagaggtcgccccagggagtggtgcggcgggcgccgaatttgctggcgctggccgagccgttcatggccgcgagcgcgcacttgttcttgctgccgtttggctcttgcttcgatgaggcagaagatggaatgaactactctgaaactaccgacctcacaaactctaccgagggtgtaagcttgcacccagagcaactgcctcgcgaccattctgggacgaaaaggacaaaaccaccctcctgtgaggacgttggcagcgccgtggagctaatcttgggcagcggtttcgtggacaccgtggtcgacctcgaatctttgtcagccgatctctccccgacgccgcctgcacgcattccttgtgtacttgatcgtcagcatcatggacatggaggtgcttgccagggcgaacccgaaaaacgtgtttccttctcgctgcgctcgccggaaacttcgcagtccgaccttcaatgatatcatcagatcttgttttgctcaaccagaagcggacctgaagtgcaagttaaatgtcgagctcaagaacaaaacgacagcgcgaacaatggcaaaagatatatgctactcatctgctcgctgactgggatgatcattatcaacaggagcaacccaagcgttaaaagcgtggtgttttcgggggtagtgaggaaaaggctcgggatgcgagtgacaaatgtaccgcctctcagatattccagccgctgtggcaaggctgtttcgggcggtaccatcacagccaaccgaccgactatgacgagaacgacttgctcaaacgtcttgttgtagagagaaggcgcgagcagattagacttgcacaacggcgattcctagcacggcgtagaaaaggaagacaatatgagaagcattttgccggtgacgctgttcatgagattagacataatcatggagagagagagtacaaattggaggtcgatgcgggaacagcggtggtgtaggtcgggtagacgtccgaatgcaggtgccgcgtcacggtacacgacatatgacaagtacgaccacggatgaaacatttgacaactcaccaatccataagaaattagcagaaagcatgaagcgccttcaaagtgcgctgggcgctgaagagttggatgaatgtgtttgtacagtgtgtgaccgtttggtgctgtgccataaaacccagcgtgtagacgatttcgactggcggtacatgaatgagatgaagcgttgcctgaaggtctcgaacaagcatgatctctgcgatgaacttatataccaataccgctctccccccccacttgccagctttagaaggagtaatggtttcgccacgtggaatacattgttacatggatgacacaagtacgccacgagcatggttgtcggtttgtggtgagtgcgataaatcgcttaagttgggcaagctacctaagttttccattgcaaatggatttttcgttggaagactctgtgtggtggatgcgggggaggaatcagccgtcgttgagcgcagaatgggcctctcggacgaatcatcgccggttatggcaaaagaacacccagtcactgggaaagttgggggccaacatgagcgtaaatttgagattcaaagatcagacacgatggcaaacgatgtagcgggtgatcattttgcacgcatgttcccacatctgttccccttcgggcgtgggcacccaggcgaggtacgagacgttccagaatctgtgttggcgtgcatgaaatattatgctatgctaagtgagcgtcaatttgcggaggtcgagatcttttaaccggttgcatttgaccgcatctcgttgcgaaatatgtacattcaaagccattttcgttgtcagcgctttccaagcgttctcgatggatacgatattctgaccagtgagcagctaggatgggcactactaaaaatgagcaacgacgacaagggcgtttaccatggcgatctgagagcaacgatgtcgcccaaccattcttgaagacggtcgagattgggacaaggtcgcattggggaattggaagtgagcggtcacagtgtcgaaaacaggttttttgcctatcagacacgatttggtcagccagccttgttcgtcacgttaactcctaatactgacaaccctgtcgtacttgctcattacgctactaaaccctgtttgacgtactagagtctcgcttgccgggaaaagcagagctacgagcggcaaatcttggaaacgattgcgcttctactcgaggcaagtcaacacattaatcaagtacgcgctgggtattgatcctaccaccaggaaacaaatgtcattttgagggttgtttggtgatgtgaaggcatacttcaggatggtggaaacacagggaagaggaacgctgcacattcatttattaatctggctcaataattgcccgcctaattcgacggcaattgaacgcctgatggatgggccaaatggcaatcggtttcgcgaggcagtggcttcatatacttgaggtattgttaagaacgatttacctgtacaaatcgagaaatgtggatgctctgagtgtggggcacccttttcggagcttgttgagttaccaattccagacagtagtcgccgagactctgtcgccaaaaccccagctacttgttcacggccaaaatcaatcgagcctgccctaatgaagtgtagctcctgtggattccagttcagttctcagcatttcttgcgctctgccttactaaagttccgtcctgactcatggccagtctgggagcgagcttggtcagctgaggaagtggaaaatcaggccacacgggagtttatatgccgtgataccatgaagagagctaatgaatattatcgataattacaaaatgtgtcgcctcagttggaaaggtgtacatgaacgcggtgacattacatcgggactattaaggatgcaaaattgcgcgcggatgacactttgcaaaggggatgacgacccatttcggaacgacgagcttatatggttgtttcagatatccccaccgtcctggtttgatgggcgaatacctcgatctttgctagattacatgatctccgcattggtcgttcagctcaaccagcacttatggaatcatacaagtagctgcttcaaacaatcgagagccaccgtgaacgatacgtattgccgataccgttttccccgggactgggcagaggaatcgtcatttgatcacgatgcggtataactagggcggaaattggggcacgagtatttaaatatgagattatggctactttccgctgcaaccatgacatccaagttttgataggcggtagagatatcgttgatcgaatccactaatgctgtaaatatgtcactaagcaacggcagccgttggattcgcaagtagccgttgctgtggctgtcctaaaccgacgtcaagatcgagaacagatcgagcatatgactatgggcgtgcaagacatatcgattttggctcggaaacggaggggggggggcgttaatttacaacataaccaatcggcaagaaattgctgggccgctagcggcattgtatctttatcggggttcgtgctgctactcaagtaatctgtatgctgcactttcgctcggcgatgtcgtgcgccagcttaggaaggtggatgaatattgctgcattttggtaagggaacctgatgacgcgcaagacccaataatcatgtggtatcatttctcgacgattacgtctaccgacctaacagtttacatagcataaagctgtatgaatttacgatgtggtactttcgaaagaaaaaagagagctctgcgagatccaggctgattttttctgagggatcacccacttcgcaacacacactgcctaggagaacgataccaagaagtcgttcctgagatacatgggtttcgcgtgccgtcggccgatagtgaaaagcgctctgaggcgttatgtaagcgcgccattctctcgctcgttttgttcaagccatttcgcacgttataagatattatcggagactgtgatttcgaaaacgaagatgcatggttaaccacatttgaaacctggaaagttacgtgcggcaaatttgtacaaacgatcatggacaatatgcaggactattacagcggtatgcgcaaggctgccggttagtataaagcggcggctgaaacagcaaattgccgtaataatcactctgaattcgataatagcagtaccgacgattggaatgacctttatcacgacgagaagcagacgctcgaatgggatttgagtgagaacgagctgtcagatgatgaatatacgggtatgtggggtgatgaaggtgatagcgatgatgtcttagaaagcacgtcgttgcatcctgctgcccgcccgacttcggttgccccggactccaaagtggcacatattatagatgttttcgagaaatatggcatgcttcaaagcatttcacaagcgataagggataccacgcgtcctgaatggcggccggaggatgtgccttctgtagtgttcttgaagaagtgggttcgcgacggaaacactgacaatcctatccgataagtaatataccagatccggagttgttgccttgttgggagtgttgtatccttttcctttacgttgcctgccgcctcctattagcggggaagttggggggcgagggccgaagggcacgagctgctgaccaagctatccagcggtctgccacgtgtgcgggggggggcggaatcacttgattaaagtataggccaatactaatcccaatactaaggaccaagtgtgtggttcgcaagcaaaatcgactctgatttatgttagcctgtatccagccttcccatccgacttggatcctatccactactggctctccttcctgcctaatttatccaacatagccactgtaccaataaactggtacggattcctacctagtctagggggtgctaatgtagatgacttgatccgtgtgcaccacaccacttgcacctgatcccacttcagctgccctgatccagcaaccgtacctccatccagcaactatggcgtcgtctgagggactgggcatggtcaccaactgctggatcccattacctggtcaacgggcaggtcccgttccatcaagaccgatcttgagcggatcttcttaccacatcatgttatccggggtcacattttttccaactttttgcgagacaatcgctttggttattgcgtcggaataccccacgacgcgcgagttgataattttgacaaactctttcgtccaaattccacggtgcgcttgctgacaatcacgaccctattctggatccttgtggaatcgtacactttcttttaaaacgataacgtctttaaacaaataccacagctggtatgttgcaaatttatccattcaaatgttctttgcgttaccaatgcgcgttgcgggatcttcgtaaagtggcctaccaccaaccggaggtaattggaggaagtctcccaccagaatgacgtgaacacagccaaaaccaacgccaggtacacgcatcggtatgtctagttgggcgagttggtacttcttcatcattgacacttcatctactataagtagctcgagattgatgagagcatcagaccctcgcttctctcgtattgtatttgcagtaaaaagctggctagcgtttccagtcatcgctgttttcacaacacaatgcggcctgtcccaactttcacataaagcctgaacagcaccaataactcggcttttaccagtgccaccaagaaagagaagtagttgcccttctcgaattgctgcctcaaacgaagtgtgttcgaaacccgaggtcttgacttgtttccagcgcgaaatcaatgctttagcgattgcttttatagcataatattgtctttcgctcaggggaaatgctgttgaaacgtccgtcacgcacgcgaattgcttattgagctgcgcgaacccatgtcgtgttctgctcgaacagagcatcacccaaaagttcaatttcatgagtgtcgtgcacgttgacagtagccaacacttgggaaatgacccacaagatctacggccaagaccaaggaccaacctactcagacccgcgtgaaggaacccccactgcggatctaccccaacatctccccaagaccccgccaaggatgttcaagctcacccgctgggcatctcgtgtcaacgagagagtagatccagcccgccgacgggtacacaaggtgtgccacacagcaacctacggttatcggagtaccccctccgttagtcggtgtctgggcgcagtgtgtgagtgtgggatccctgctatttctagcggatccactctatcacaatgacccgagctgctctgaacaatttgttcattcgaacggcagccaagcatttgcctgaaaatgagtatcccgttcgtgtcgtggccaacttcaagcgaaaactaaaaaggcttagccactcggaaataaccgtggttacgagcttaccggatacaaatttggcagaatggccccatacttggattttatcgttggaatgccgattcaagtatcgcagaatatacgtgcacaaaaaatggtggcgaatggtactttggggcggcttgaagctattatttaccagcccgataccgagtttcgcttggtacacgaccgtgttgccaatataacagttaaagtccaaagcttcccgccaccagcggtattagtgcgaatcgaccgaggtacgtcggccgtagcaatgcatgggtgctctgatccgaacgtatttcctttatttttcgatgcacaagccttcggtaagtgtaatattgcactaccagggttcgtaacaagagtgccgcgctcgctgtctctacgtatacagtaatttccgttagtttgtgcggtatcgtcaacggtttacaaggtgcagggagaaacattagaggcgatgtttgtgacggagtggcgttcaacgagtgctgctgcaaataaaaaggagtagccatatcttcttgtatcgcgcgtgactactagagaagccccgcctccttctccagattcagcgccgccgatctcgccaccaccttctacagattcatcgccgccagtctcagcactccctactccaacttttttatcttccgattcgctgcttaactgcaacgaagccgattattcattttcgccagttagtgacagagcttggagcggtaaaccaccttgagtgggcgtcctaggggtgcaaaatgcagggggcgacgttccgactctcatagtccacgctatcgggagaagcaccgtcgtcttcctcacaagactgaattttatcggatctcgacatttgacgcacaggaggtgaagcgcaactagatgattcgtgagatgaagcagcggtcgacggctcgtagctggagtcgtccgcgtcgtcacccgctccgctggaatctccaccacttgcccctgcctcttgcgccgccaattcttgctgagccacttcctcgtcgattgctagatagctacaacgggggtacacgcacaagtggctacagtcacttgttactctaacagatgcgatgactgttagaggtttgaacacttcctcgaccttggtgtaaagtacaccaatggctacatacatttacgaccaccacgacgggtggtccatacccatttaggattcctattggctgaaagcagcatcttttagccaatgagtggcttgcatgtcagcagaatcctgcgaaccagccgttggcagattcctagtttagaatattacattaagaggaagtcagaaacataaaacaaaatagcggttctcatcgtttaacaaaacccgctacttggagtatttatcttgtttaaagtttactcgtggatctcgagtatactcaactcaagtaagagaaatctacgcttcctcatacacgtgcgcgtacgtgtaagccgtagtagtgagccaaggtaggcccactacaatagcgcagtagatgttgtccacgacgataattgcgctctgcatctaccgcacacatgtagtcaatatcagcttgatctgcatcgttgccgacccagtgaagagcaagattaaatgccttcttggcaatttggttgggtctccagacgacgtgtttatgaagatgcatcctaggaatacgggtttctttggttaacagtatcagctgaatatgaatcgtttcttttctagtcaacctagcatacaatccactattttgattcgacatcctgccactacctgcttgggatgacaacaaaggcactatgtaagcgataggtcagcaaagatgccttcggtgcggcgcagcggaagaaagttaatcaaagcgagcaggaggaggtgaacaaagccccaccttcctctatacggtatcgagttcatcgtagctggccatatttttgtattattgctctaagctcctggtgtgcaatgtatgtcggtttttcaccgaaaaacagccatggtattagaatgtgacaataatcatatattgtgccagcttaaacaacccaatcatacagaaagcaggaattcaaacactaagtgaacaacactggggtaaaagtcgggtttgccagcgctcaacctttcggcataggcttctatagaagcaccatggtggaatcggaagccgtggaagcggttcaagtgacgacgcatcgcaagctttccgctgcctcggaaggtcccgttccacatgaagcagaacgggtcatccgagcagacagtgtcatccaacgcgggaacgataacgggctgatggtcgggcgagcggtccgatgtcggcgtgtccaggaatgggtggaggcagacgctgttcgtttccgaaccaaccggggcaaaactcaagtcgccgcgatagacgaaaatgtcgcctttgcgcaacatgatttccgtgcggttggagcgcagtgcgacggtgtggttccacccgtagacgtagaagcgcacgtcgcccaaagctacgatctttccgccgcaacgtcctgagggtcattgttgtctggcctcacgggatcaaaatcacgtcgcacagggagttcgcgccagccagctcgcatcttgaaccagttccggtcgttggcttccgattccgggatgaacgtcttattgaagcgctgcaacgtgttcgagcctcttcatcaggcactggcgacttgacacggccaatatcctccacgacaccatccagtacttcactgaaccacccgcgagcgtggcgggccatcgttctccacgcattcgcctggtgttcgggcacagcgcggtagaaggtgacttgaccgtcgcaagcaaacttctgacgaatgttgatcatcgcagcgagtcgtaggcgaggttgtggcgtggtcgggtcgcagcaaattggaaaataaagatcgagtcgtgcctatccgtgacttatcctaggggtagcagggttagatatatatccgaggttgatgctttcatgccacgagcttatttagccccggacaatgtgtgtttcactcgagacaacatgtaccatgtgcttactgacgctggtgtacgggcggacacgcctggtgggaccactattcttccatgatggcccgccgataaattagtgagccaatggagtgtaatggccctccgaaatatttgcgcgccaatagcgcatacccttactagcgagtagataaatcagccctattcgattgccacgacgcggcacaatgtagcagaactacgctacatatcgttaaattacggtcgtagaagcgaaacaactgttttgtggccaatacttggcttattcagcgcccaatacgaccccccctaagaatttatcacctgatggccaatatgcctgggcaggctatcaggttgatgagattcgctagagcaaaaggcagtgttcatgcgaggctcaccgataaattagtgagccaaccatgaagaggcacgtgaaaccattcagtcagtaccttgaagatagctacgatatgtacctattggtcagccgatattttagtgagccacacgatatgtatctattggctcgccggtatttagttagccacaacatatacccattcagccaaatacgggattaagcctggaacactaatgggaagcagaagacccgtgaagcgagatatgtataaacttggtaaatacatcttccagaagaaccgtgaggagagatctgtataacacacatatatgagcgaggtctggatcaacacataagtatgcttggtgacttctggatagagtacatggatatatcttgattggtgactaacatatatgatacagtctagctccgccgttaaattagtgagccgttcgtgaagacgggctacacagctatatgtacctattggctcgctgatattagaacaaaacgatgcaggcgatggccagccacgatggatagagccaggttacgagtgccggttaagcccttagtggcggtacaacgtcaaacatcaattgcccagcgaaagctttatgctgtgaggttctttcataactgtataaaatttgcatagcacacatctaatgcttggtgatgtccacacaaaagctgtaacatcatctcaaagctttgcgtttctgctagtagcgtccctggtcgactcgggctcactttttaagaagcgaatccaccttgaatccaaaatagcccgtatctttagatgcgcaccaatacagtacaattagacgtgccatgactatttaccgtgtacgacctgaagggcgcctcaccctgttgtgacatccagttttctcggaaatcatttgtatttactaacaacaaaatataccacgcaactcgtactgccgagatctacctgaatccggtctcttttctcaatctaaggtgaaactaaaaatctttttcaaaaccggcggaatgattatcaaaggtgcacgactatttaggtcacacgactaattagggtgaacggtgtacagttcactgggagccttacattctgtaggccaacttaaaatcgcttaataagcaaggtggcataagcccgtcaatgcaccgagcctatccccgtttaccgtcattgcaaaatcgtcatcatggtgggtaagccacgtcgcgagtcggtcaaggtggccgagaaggcagctacgcggggactaaagcgacgtgaagtcgttcccgagactcctaccagccgtgagaatactgctggcgaaatcgcaattgacaccgtatcaacgtatgcgagagttgccggcgacgagagctgtcgaggcggagcatggcgcagttgtggtggatagagtcggaggtattgcttacggctgacgaccaattcatctggttaactatctcgcgtgcatacatttgtttgtttaggtctgcaagcaattttgcggaacaagggtcaaacgaataggcttcagatccggatgaagctgctctggatttcggaccacgcgtatgggcagtggaagttgtgcatctatgctgctaactatgtattgtgagttctactctaattttccgatcggggcggattgaatcgaccgtggcaaaccgccggtgaatcgacaaagcacttgggttgtctatggtcgcccggctatgcccccttgactccctattaagtacggattgggcttgacatgcgggcatagaaccatatgtttgttggcaggcgattcggcaaatgacttcatgtttgtattggtcggttggacaggggccccaaaaccgacccgattcggcaaatttggccggaattcactgcagcggggctgccgtagctttgcgtcagtggaagcttaacagactcacagagtctcagcttaagatagcccgttctaataccagaacgtacgagtccgtacaccttacggactccaagagtcaacccttaactcttaactgtgtgaatctcaaactgaatgtatttccctttattgcggcagagccgcctacggtgtatatgtatccggttcactatctagcatagtgaaccctagtcatatgcataatcagtggctctgaagacatgtactgattctcctactcgtttaggttagacagtgtatacccacttcgcaacccttcgggtaactctcgtgtaaccccgttacattcacaatactactgcggctgtcgtgtaggttttcaagacgtcgtacgaagcaaaccgacaagagatcgacttccttccgctgaccgcgacgctctggaacctcgagtgtgattccgagctgctaccaactcctggttcgattgtcgacattaacgagtacaccaacctgcagctctacaacgatacgcagtgccaactcacgactcgtctgggccagctgagctgggagcagaccgatctgtaaatggatgtagtgataggctagccgcagccccgtagttacatgaaaatgcatctgattccattcggcgcacatctgattcgaactccaaatgggtacgctatgcgaccttccaccagagtccagaggattcatttccgaagtctcagcgtccagtgtaggtgcgtcgcccttaaacgagttatacgaagagctacctgatcacgcgctaacaccttctacgtcgatagatgacaaagcgccaggggtctaccaactaaagcaccagcgagatgcatagcttgttcaatattatccaagcaagcttaccagctacgagtgctgactgggaagctgttactgctgcgtataataccgcggagaatcccacggagaagcacagggacgccatgagtctgaagagaaagtttcgcagtatgtgcttagcgtcaaagcacacgcgcaccgatctagctagagctacacgatgtgcgttcaggaccaggttaaccagcgcagaatctctgataggggcggcgcgatcgagcccgcatcaggccagaaaccttcgcctgggggccttgcatcgacataaactatcgctgcaccgtcgctagagcgtgcaaggccgacggctccggagggagagcaactgctattgtggttggaacagtgcgtcgccgtacaagggcactatgatggacccacttcgtcaccggaactactacagctacacaggttgcgtaaggcggatcggaaggctgcacgtcgacatcacaaggagctactgcggtacatgggtgtgctgaaggttgctctagaaggtttaacttcgacttatagccagcaacagtaaccaagcgccagtataaggatgcgcattcacagtgctgaggtagcccatcacggcactggcccactaaaagacgcaacgagccatcccactactgtaatggctcggaaacttaataatgatccagcgcccttctccacctaaaagcaactcgaaccccacattcacatatcactgttacacttcacacacacttcacaatttgctctgtacatggctggacgaggcaagggggcccaaggcctcggacaaggtggtgccaagcgtcattgcaagattctccgtgacaacatttaaggcatcactaggcctgcgattcggaggttggctcgccgcgctggcgtcatccgaatgtcggcactcgtataccatcaagctgtgctgagggtctacctggccaacttgattcgcgatacggtgacttacacagagcacggcaaccggaagacactcaccggcatggacgtcgtgtacgctttgaagcgcccgggggaatttctttacgggtatggtgtctaggcatatagcatgttagtaccaggcagaagttatatcaagcattacgcgaataatataacgatgaacaattccatcctgctcagatatacactgtggcagcagtagacctttttgaagccatgtcggttttcacatgataaaccgacacgacgaaacattgtttttgtgcgacaattaccatcataccatcatttcttatatttcatattatgtatttttattttatttatgcattatgcattttacagtgtaattatgcagtgtattgccgtttgcagatattttggccaacgcatgcttattatctcgtcaattatcttgattttaatcccgccaactcttaattaagacctaggtctgctttatataatatattatatcgccagtactggtctaacatgcaagcttcggactctgttttcccgaccaaaacgcttttctgcggcttggaaacgcagaaatgccattctcgacgggccaaaccgagtttctgggcctaaaagcggccttcaccaaagcacaaaggtaaaacagccctcgcctatctcgtgtccgctcatagtaagagacaggcgtggtctattttagaggacaaagtatttacaagcggcaataactaacattcaactatcacatgtgattattataataaagtaaagcaaagcaaggttcttacgaactacaccatctagtcggaccctgactaaatgtggtatacgatttttgagggggaaaactaacgtttcaaagtgttctagtgttctaagtacggaaccacgactatttgcgaacgactaaatagcgtgaacggtgtacgttcccccccccgcgcccgcccgggtgtgccaatgatatccatattgtgcaagcgaaggtaaagcaaaaggttgagctgcttgatgtatttttggagagagcagtttatttttgtgtgcagcgaatgtaccgacgtatagcctcgatgtcccagagcccacagtctcatgcgactgtgaccgcgacaattgggacttttggctccttgcggctttgtcgttgacgcagttgacgcctcaaaatgtacgtagtcgtcgtctcccttcatggggctgcgattgtgatgacgaagcgcaaaagtgcgaggatgccttcagtttcaacaataccgtctcgccagtctacctccattttcgctttttagaagcaagcagtagttgtctaagcccgcttcttcgttttcctgatcggcaacaagtgcgttccggtgaacactagcaagaactatgccttccggtggtaggcaatacgtctaaccgatctcgggggagacgtcgacaatcacggaggaaccgaatactgatgctcgggtaggtggcagaatgacctctcactccagcaaccaattacgggtcaacttccgcggtgtcaggatcttcgcggtggcagcatttgtcgttggagttattgggttgattctcgtattcttcagcggaaatggcgtccatctattttccatcgaagtcagcgaattcagcgatgcggaccgcaaggagttgctggacgcgtacaactcgaggttcagcaacttcacgtcagccgtcaataaagtgatcgaggttgccatccagccattgttcgctgttggcatattgtgcctgggtgccaaatggctcacaagcaaaaccggcacgagcattttagcgaggatgtccccgacattcatcggggctgcgctagggtttttgatatgcaacgggccgacctcgatgaatgtccagctagttcccggaggaacgtatttgcggatggcgacggaagatttacaagtagcgcaggtcagtactcccaacgacaactctgcgtggaacgtatcgcttgacgagagggccccaaacaactcggccttgaacaccatcttgcgtgctcgatatgccccagccgaaagcctcaatgccacgtgtcaaattgtactgggatctgtcaggcgtttcgggctgcagatcgatcttccacaagttgcatttgattatcaagatagcaattggctatttgactccctgcctacagctattgaaccgaaagagacatttgagcttctcgttcgcggtagcggagatggcattagcatcgacggcacgaaggattttagttttcctgttgatcttgcaacagctcggacagtctacgtcatggctcttatcgagttgtacagtaatcttagggctctatggggtataacttcccgtttcaaagaacgcggcttccacgattttgtgcgcgatagtcgagcggcagcgatcgacgagtgggcgggcgatacaaccgaagtagacgatgatgaacttgaggtgggtgatctgatggcttttgctggcgataacttcataccagctgcagccatgatgctgcaagacctagttggcaaagtgccgaacattatcgcggatgaagtcggggcttcctatcaagtgcatcaactcgctgactctctgagctacgtaccgctaacgttgacgattccaatcagcaccctgaacgcagcagatgcaaaccaaaccgtcccacttgttgaacggtgtgccccagacggctgcttactatacaatgattctatgtttggtactttcgatacaaccaatgagatcaaacctgtcgtcaaagcggcggtgatatgtgggacgtcaggctccaattgcccacggcttctttcgtctctcggtaagcgaatcagtggggacgagttcaacttgctatggagctcgactcagcaccgattccctaaaagagcaaagcaaagtactcctcgccaacagcttcccgaccgagctctatgatttttcggagcttctttccgcgtacgaggtaaacttggtccccgacgcgttggtctggagaaagctggtgcaagtcgacaaagcgtttcctatgctgctaccccgtaattatgtgaaggtcgaccaaaccgctcaacaatacctgagcgacaccaacaaccaaaggttttgctccatgcaagcagattcgttcctaaagaacaccctcaaaaatcacttatttgcggaggaaagtctgcaagtgagctacaccgcgggactgcactacattttccagtttggcgtcgtgcatacgatatcctccagtactggctaatccgttgtggatttgtccgggaacagccacgacctgtgcaggtgtcgattccatccaccaatgcaatcctttcgatcataggttgttgcggactagtggcgttggtcctagcgattgccacgacgcacagccacgggaagtccattattgaaggcaacagctctgcccccttgctcgccgaagccatgatgaatactggcaagttcccacgcacagtgctcaaactctcggtcgaacaacgaggtgcggaaggagcccaagcacaggtaattcacattggccaggttaagatagcggcggtagagtttgtcgagaaaaatcaaccgagttgatactccagcgctggacaagttcgcatcgacgcacaacttgaccccaaatgcatacatgtgctctcctcactaggaaaaaaataaaaataatcaatcacattcgtattcataaatagctctggatgcaaaacaatgatgcaaaacaatgtcttcgttcgcacacctgcacacacacacattaaatgactatcctcgtggagtcgcctgtagaacgcgaatattcccaacctccgagtaccctcgcgcccgaatgcgccgcagcgagttgtcggacagacgcactgacgaggacgagaagcgcatgtcgggcatggaagctgcgcggaagtcaatccgatcctggcgtgtcttgagtggccccatttgcatcgctagagtggattctgcaacgctgtcgagagcttcgctgactgagtcgagtccgaggaatagtcccacggacttgtcgatgtccaggccgtggcgaggacagtggtgagcgtcctgcgctaccagacgcacaaggtcccgcaggaaatgcgtgagctccagcatgcgcgaggctccgtacttgttcacgtccagcacgaccatctgccgcgcaggtagacgcgacttcttgagctgctcgaagaacgggtggcacgcggggcagtcgcgacattcgagcagcaatgcctcgcgcagccgcttgaactcgcggaagcggcgctccatgcggtagatgtcgccggtctcctggtggcacgtctcaatctcgtacacgaagcgcgtcctcttgagggacgtggccgcctccttttcctcgggacggaagcgcaacacttgcacggccaacggcgtgggcgacggcttgcgatccacttggatctccaccagcgactgcgtcaccacgtcgaccacgcgtctctggaggagctgcaccatcccaacttgactgcgttgccagcgacttgacttgaggctttgcggtcaatccgggaatgaccccgacgtgcaggaaggaaattagaagatgcgctcgtcgcgcaggtcgcgcaagtcgcgacgcgtatcaaaaattccaactctcgaccaatcaagtgggattatcagattcagccaaccaatcacgacatcggaatgctttgtacagtagcaccccttctttgttttaacaaggatgtccttcgaacctacaccatgtgcgtggggaagctcagcaagtccggctgcaggcggctccaggcctcaacgaggcgcgcgtgctcgtccgggtgtgaccgctgcaatgccgctgggtcctgctcaaagcaacacgggcatgtgcgcggttagtcatccaggaggggtgagaaacggcggcgagcggctggggtggcccgtttccgaccaggtgtatcctcgtcggattcagcgtctggctgactgaccgccagcccggaagtgccacagtacgcgccagcaccgccaacaggttgacacggcatgcatgcaacgtacctcggcgaagcagacaaagatcgtagcgacgatggagtccaagatcgacgacatgatcgtgcacatggcgtagccgatggaagcgcacgccacgaaggtcatgaccacaacgttgaaagtctctgcaacgcgacagacaaaaccacaaacaaccgctcatgagcccacagtcaacgctctcaagacaaaattcggcagccacgtacggcactctccagggtgctccgccagctcctccggcgtgcaccgtagcgtcaggtacagccacgccgacccgatgaccccagaaagcgtgcctgtcggagatagaagcgtcgcgcaggatcacttgtcaatcaacctgtcaggcatgtcgagcaaagaagcaagcaaacgtaccgacaaccagacatcccaccgcgagcacgctcgagatgagcgagtcgttcagcaacgccgaccagccacggtcgcggaagagctgcatggtgtccgatccagctagccgaaagtctttgccgtacagcgccacctgacaaaaggcgtacttgttgaagtactgcatgttgcgcatgacgagcttcaccaggaactccaaaaaagcattagcgctgcctctggccttccgccgcggggccgagagcaacagggtgtgcagtgcattcagcgcagcaacaacgagtgatccaatgcagatcgatccgagagacgtcgtcagcacgcgtgtttgtgctcgctggattgtgttcacatcgtgcgcaccaaaccaccactcgcccaccgctccagcagtaatgcagtgcaccacattcttcgcaacttgcatgaaccagtagaagctgcaacataacatcaaatacattagtgcctcgatgcttcaaactctgtcgtagtattagatgtcctacgcacctcagcagcatgaagaagaagcacgtgttgccaaaagtgctcgagtcatggaggtggcccaccgccttggcgagtaccccgacgaccgcaacaccccatacgatgacccaaacaccttgcgccaataaggccatgtacgccgagctgatcactccaggaaacacccgcaggattcgcgacgctgcagtcaaattggacgcggcgaaggcgatcgatcgatgcacggaggcgtagtacgtgacgatcgtcagcgcgaagaacaaattcaggaatccgatggccttgccggccattcccgagtcgtagaaggctgcgagcgacgccacaatgaaggccacaatgctgaacttgagtgtccaggtgatgactcgctctgcgtggttctgcagcacctgcagccacagcgccgacacgccgccgccgatgcacgacgtcgccaggaagatgagaaagatcttgacgccgtgcgacgagtcgtcctcattgtggacggtgaagtagatgctcgacacgttcgggaggccgaagaagagctatcaattaggccaaatacatgcaataaagccgagaatattgcagtgagcttgtgctcatctgattagggatttcaacacagaattccaggtcaagaccgtaccgcgatgaagctcacggccgccagattggcggcaaatgccacagcgaagaaatagtccttgcgttcgtcgcggcgtcctgcagggagctgctgcggcaccttctccagcaacacctcctcgtccgcgcgatccagctccatgatggtggcgttgcgttctggtgggaagaagaacagtggtctcgcaccggagtggctgaaatgctagaacatttaatccaatcatgatgcggcggtttcgttgaagttgccgaccatcactcttgaaagtttccgcactcgacgcttgttgcgcacttgcggacgctgctaacgacggtcaggatggcggagcacggcgagttcctcacgaacctgacgctggacggcgtgcgcgagggcgcctacatgctgtgcaagcactcggacgacctgctgggccaccacgcgcgccagattttccgtgagaaggcggcgtccatgcgcgccgagaacagcatcttctactacctcaaggacctcatgaagaagttcggctcgcagcagcacgcgtcgaaggtcaagaagacggcgcacggcgacccgcagcagctcgtgctggaggcgcacgagttccgcaagctcgtggcgagcgacccggcctttgagagcgccatcccgagcgaccaggtggacgcgctcttccaccgcctcgagtgcgactaccagaagctgctgctgcacagagactttgtagagttctgtttgctggatcaggaccaactgtgcgtaccttgatgacaccacttcggtggtcttaagtagcggttgatcctgacatgttctcttctctcgtttcgtttacgatagccggttgctgctatataagtatcggaagcatttgaaaagcttggacttgacagacaatgacatcgcagataccttcaagcgactggctcctcctgatggcactgcgatggctccagagctgtttcacgcggcgatcatgcgcgacttggatgttacgctgacaacaggggtgggcatcattacattgtcatggtgggtgtcaacatgcagctaaatgtttcgtggccttcttgatctgcatctaggagcttgcgtttgtcatggatcttatggactcggacaaggatggtatggtgaaggtccacgacctggagctgctactcaaggacgagcgaggagcggaggaattaatgcatccccctcgagaaaatagcgtcgtggatattaagatatcaaccaacagtgtggaagaagttaccctgcggagagacaattacacccaactgtttccaaaactacaagacgagagcaacgccagtccgatgcatatctggtttcgtacagcagctaaagaggacggaaagtctccgatctccaacatcacctatgctacgagctcgcgggatacagagcttgtgtccaaaggttttacgtgcatacaacaaaatatcaaccgaaatggcgcgttcgggaagcacaagtacatttggacgagcctggtgccgtcgagtacgcaaatgaccaatgagctcattggcctgtcactaacaagtggagatttgagcgacaagaacaccgcacgattatggctacctcgtcaccgtggattcaaattggtgccggggaacttgaacgagaaaaatcccaaacgtggtgttttcctgtggttacgacgtcgtcgtgcgctatccactcatgatcttgttcagcctccgcataatgatctcacgatcgcatctccgcgatcacgagcaaacctgcaccgtcatatcgatgacctggaagcacaagttcggaaaactctacgaaggaactgtccaatcgatcaagactgttcgttaaactttaatcgcctgtttgaggaattcgatccgaagaaggtgcgagccatcaccaagcaagcagtgcttactgggctcgaggcatttggcatcaaaatggacaagaaggtgcgcgacagaactcttagctgctgatgtcaaccctctcacacataacattatgttgatctctggcaggattttcgacttgtttgggaacgtatcaacccatttggtgcgaaggtcattcatgttggtacatttgcgcagtttctagaactcacggacttcgaaatgtacgtgcgggttgataattcaccgattgaattgcatgtggtaataacatgttgatgatgctttgtagtgatgaggtagtcaactcgttacaacgaacgatgaccacacgtttcggatatcacgttccgaattaccggctcatatttcaatcatacaatacgctcggtgacggcaaacttagcagatccgattttcagcgtatatttgcgaccaaccagttgagcttcaccaatagtgagctcagcaaggtgattcagcgatttgacgtcaacaaggatggcgtcgtcgactactccgactttttgagctacatcaccggaatttgcgacgcgtcagcaagggctgccggacgtatcgccgaggccgccgatgaattccgaacatgggccctcgagaagcaaaataaaaggcttgctaaggacggcaatattgactcggcatctgcgtggcgcttgttgaagacaaagcacggtcggctggattccgaaactataaaccgtattctccggcagcgaaggaagcggttaaatgcagaccagattcgtctgctacaagtgttgatggcaccagcaacaaacgaggtaaaccaatcggcgttccatgcttttgtcaatcatgtcccgaagaaaatgtacgttagtagtagggtcgcgagggtttggctatgcgttcatcttaccatccttgttttcctgtgctgtagttcagcaatgctgtacgagttgaagaagttggttgggtccgggcccgttaagtctgatatcgatgagatatacaaccgtctaaatgtcgaggctaacggcaagttatctctcgtaaacttctctcagcagctgaatgctctggctgcagaaaagtccacgcgccagatagacctgaaggatttggcatacgtggtacagtatacaggagcgaattgcggtggcgatggtgcggtgctaattgacaggttcctagccgtcgtccgtgacaaccaagatcgcagaaacatgaagagtgagtttgtcacgcactacgacagtccccagtttctggagggggtaaatttgctgcgcgacgagctcaaacggtgtgccaaaacgcctgatggcaaatttgactacatggtaccttttcgacttttcgacaaggacaacacgggcgagatcgttttgtcagaatttgaggtggcaattcgtgaactcggtgtcgacaaatatctgacagatcaagaaataaaggggctgatgcggcggtttgaccccaactcatctggtgcgattgattttgacgaattcctccgtttcaacctcgccgagtcgtcgtcttcgtccagcagaagactgaatattgctgttctaccagatcccattctgcagcgtattattgaagacatcatcattaatgagcggcttacgcgggaaaatgttggagcatactgtggttccataaaacgaatgtttggaattattgacaaggacaccaccggcttggtaccagcgaaccgctttgttgagacattgaaggagatgagtgtagccgtgccgaaagcagacatggatatattggtgaaggagttcgcgggagaagatgaagctagcggagacgttcaatacttgctgttctgtgaagcgattgcgcaaaagtgccagcaaggggaagaagggcaacatgtgttggattcgccaccatcagaactactcagcttgctgaagaccttgcaccagcagtacaatcaagcgaagcaaaagctggaagtaagcggtcacgagtttgacatcgatcgagcattcggagtggagaaggactccacgaaatgcgtgttcatgtctatcgatgatttcaaggatgtgttgtgggctgcgggtgtgcaccacccctatttgcgcgaagagctggaagtcatgatgaactgctttcaattgcaccaaaactccgggttcaatgtcgcgctatttcgtcagttcctgtccaaaggcccgagtgcattttttgctggtaactccggggctctcgacagtcatattgaccgactactaggagaacttcagtccttcctgtcgacgggaaaagacgctggagctcggctcttcagtttgttttctgagctagacgcagactcgagtggattcatttcccatggcgagtttttgcagctgcttcagcgagccggatttaggcacttcctgagctccgaagatgagcaactactactccagttcctggataccaacggtgatggagcaatatcatacacagagtttgttacctttgccaagcatgcggacgagaaacctaaactactagtcgaaaagcaatcaagtatcgcatcattgccgtccccaacaaagtcggtagttgctgaaggaccgcctgcatcgccaacgcttgcccctgtgtctccaacaccgggatcaccagccaaagattcctctgctagcttgggtacgagcagcccagcaaagcccgacacgtttgagcgccctcacgtcgcagtattgaatcaaatcggcagactcaacagggtacttcgtccacccttccctttcgctaaatatttcagcaagtatcgtgtgaagcaaactgaagcacgggtaaaagttcgagtttttgaaaaggttatcgacaagtttctggatagactagtcattcaacgagtggtttacagcatgaaggatatggatatcgagctgctggtgcaggcgtatgctgcgacgagcgatgatggtgcgatgatcaactacgaagtgtttttgggggacgttgcaaaagcccaggaaaaagcagcagcagctaatgctgatagtgactgcagcagtagtgagagcgatgacgaactctcctgcagcagtgatgaagaagagcgatccacaatcaaggtctctaaggctatcgggtcagtgttactccaaactattaagcacgcccacaaaacagcggctgaactcgaggcattgaaatcgctgttgagcacgctcaataaagatttgggtgcgaagaagcaggaggctatcagcgaaaagaagatttacaagcttttgatgactcttgctttgcggttgcgaaacaaagatgcgtccaagcttctggcgtgctttaagatagagcactacggtagaaccctctacgaggtcaagccgttcttggcggcaatcgaagagcaagtgaatgttgccataggcccaccgaaggagaaagctgcgcctgctacacctgttgtttcacctcccgttgaagtgaaaccaattgctcctgcagctgccacacccccaacgctcgaacccgctctcgcaaaaaagatctaccggtgctttctagcggcagcacagcataatatcagcggtcgaaggctactggaaaagtgtgatgttgcgaagaccggcaagctgacattgttggaatttcagacaatactgcgtttgatgggatgtaagctcaccgacgccgagctggaggcggtaaagactgctcttggcgacccaaagtcggcacaaattaactacagtattcttgtgcagcaaatgggaccggatcgccaacaccgaccacgcaaggcgcgagccataagcgctgagattcttaacttcgatcgtgtgcccgaatactcagaaaaactgcagtcatgccagatcccaagtcctgttgctgctgcccgtgcatatcggcccgagcctgggtatgcccaaaaggaatccacgcgcgccccattgtcttttgaagaagccaagcgaattgatagcttcgtcacgcagttcttttccgagcttctacatatgcggcaaatcgattcagcgaggttgcaccaaagttttgagccctacgatatcaagagctcagggttcatttcaattgacgcattccactcggtgatgaggaagctcgatatcttcttgccggccgacgtgtcgtcgtcggtgatatcgcggtttaccgcggtatctggagaaaagtttgactacgttgattttggccaagttgttgcttctggtcttcaacccaagccgatgccgccccaggtacaccctacaccagtccagcttaagcccatgacgctgcaagtgcaacctccacctccaattgttcagtcgacgcctgccgtggatgccgtgcgtgctgctccaccaggcaatcaaagtgagcaagtagctgcaactcagagctcgagagggaaccacccagaggtatgtcaacagcgccaaatcggttcaacgcatcgctaactagttattgtgcatgttattcaggtgttcaagctaaacctgccagccatcgaaactgaactcagtgcaaaactaccagagccccagctcaaacgaatcccatccaaacgcagcggagaagaaagcggctggagatgtcctgtatgctttcaccaacagacaagagtcacagctacttgtgaaatctgtgctgctcagaacccggcatccgtcgagtttcaaagtttgctccaatgctctgcgtgcggattccggaacaagccagacgcgcgtacatgcgagttgtgtaccgtaacactacggcgctcaatgtctcactccaatacctggagggcatgttcatcatccaaacattcgggcacctcgcaaactgcagttccatgcgatggttggctggcgtagaatctcagatatgctcggcaaggtaacaaagttttcatttttttggctcgttttcacgggattcgatgatagtttttgtacttgttcgtggcgaagtcgaagtcgcactgtggtgaggtgatgcggaattttttcttcttttgaacgatgaagttgtatcgcgttcgctggacccaccaaatttcgtaatcgcccctgcaaatagttcgtgtgcggtctcctttgaagaacagcggcagtgtagtggtgcgaaatccactaggatactgaccaaacagccgtgtttgactcaaaatggcctcatttcctggttcgtgcagctcaaggaacgtgccacagtggtttgacagttcgtaggctccaccacattgaacgatgtagctgttctgcatgaatccgactgccacgcatgtatcccgtttacggccgtcgacattgtagcaagacgcgagggcattgatagagtcattgtagtcccagcaggcaggtcgcaccacttcgtccatcggcaccagcgcacgcagtcgcccaatgcaccccgagttggtgtaattcttcgtgatcgtcagtccggtagggctcaatgtcttttgaaggcggtaaggcaccaagtcatcgtcaagatagcaattctggtcgaagatcgaggggcggtcgccgattcgactcaccgacacatcgagcgttgcgccagactcatccacgagagaaacttgttccgctacggtggccgacgagtccacataggctggttctccgaaacgatctacacagcagtcgacggcgtggttacggcacggatccagcagcaggcccatcacgtactcagtcggttcgacaaagctagagagaacacacaccacagcaaatgaaggatcgttagacaaaaggactcagtaactcctgggcgagatgtccgagaagcacctgtagatgtcagtgttgatggtggcattcgggtcacgagtgtcgatttccacctccaattcttgctgttcctcggcgtaggcgcggtcttcgagctcatcgcctttgtcaggcgcaacgatggtctgcgttgcagcatccgacgtcaacgcagacaccgacgcgatcgggttcatcgctataaagagaagtgcgatcagcgccggagcattcatcttcatcttagccgaccctgtcgaagattttgaaatggccgtccgacgattcagcgcgtccttccagcggtcgctatcactagcgagccgaatgccgaatggtgaatgacggcgcatggcggtcgaaaaagcgaccgctgccggttccactccccctcgcccccgtcgctcctcgagcctctgccaaccaggaagaaccagtccggaccaatgccgcgaccaacggaaacagaacaagcagtgccaaggcccatgcgaggaatttggccaagttacagatgcatcttccgagagaggtggtcttcttcgacccgcgtcagcgcgtgtatcactcgcacgtcaacctcagtggctggcgcgtcactgatgcgtcgctgcagcaactgcagacgccttcgatgcaggacggcagccaaactgggaataatgtggccaagtctacgtttcatactctcactgtggatggcagcgcccacatttccgtcaaaggcttgcgcattatgctcgaggcaacaacagaaggaggtggtgggagtcttcgtgttcttcggttgtcccaatgccagctactttctcgtggaggtggcgaaatactcgagggcagcagtctgccgcgctcgctcaaggaattggacgtgtcgtcgtgtgagtgggtagacgatcggtttttgcgtactctggcgcgccattgctccgttctcgagcagatctcactcgctcgatgtcgtcgagtgacggactacggcgtcgccgccctcggtgaaagttacgcagcgtctctcacgtctctagacgtgagcttttgcaccaaacttaccgacacggcgcttcttgcattactgatcggttcttcgtctgctcaagtgatgccaggaggagcagcgtcggcgtcttcagcgtcggcgcgaatacgggtattgaatgtcgctggattaccgttggttgatggtctcacactgcttggtctgcgtggtccctgtgcatctcgcctcgagtcgttggatttttcagggtgtactgtgctcagggttgctgcattggagcgactggcacgagtgcgtgcactaacacgtctgaccaggttggatctatcccggtgctcgctcgtggatgatcaggttctttccgctttgggcatggcatgcccccagctagccacactgcagcttgcattctgttccagtatcacggatgttgggattcgccgtctcgtgggggagacagcaagtttatcagcagtgggcactgaagaccagcacgatgaagaagttaatactggacaaacaccaactctagggggctacgacgatcaggatggcgaagtcatcgccggaagtactggcgagcgtggctgtctagagctgacaactctagatatcacggggtgtttccaggtcacaagtcaagggatctcggcacttggggctcgatgccctcaactgcaatccgtgacgcttgacggcgtgcgaagacttaactcttccggcgttcgagcgttgatgcgagggtgctgtaagttgcgtgctttgcgatggagcggcatcctcgtccgcagtggtcaagacgaagccgctgtcccgggggcttgtgctgctttcttctcgattccccatctcagcgatgtcacaatcgcctcgttaaccagcggctcactgaagacactacacattggaaccaccgagtgtgacgcggactcgttggctgcagccctgcttcacgcccgaaaattatcatcatcggtgcagtcactcaccgatcttgacgtgacatcactcgccacagacgcgctttgtgaagcgctaggctcttgctgtataaatcttcgtacacttcgtctcagccgatcccgatatttttcgccgtcaagcttcctcgctgtacttcgaggctgctccaagctgcgcgtactcgagttggagagctgtgaacaaatacgtgacgaaacactgatagcaataagcagtacaccgtgctgtccgcacttggaaacactggtgcttgcgaatgactggcaactcacagactctggcattgccgcattattgcgtcctgccatcagtttattccgccttgatgtgcgtcactgccccgagatctcattaccggtcctaaaggctctagcagcggcacgaggacacattagtgaagctacgcgtgatggtttaacgccgcgacatccgaacgtcgtagcgttcttgcgtcgcgaacacaaaagacgagcggcagcgcggaaaattacccggtggctgcgctgcaaactggacgcccgagtcagtgccaagtccacattggagcgcgctcttgcatacttcaagcgattgaagattgaggcagcgcgcgtccagcgctggtatcggcacaagtcagcgcagcgaaaacaacgtcgaatgattgccgaactgcaacgtcttcgggctgagcaatgcaaaacgaactggcggtgggtcgaagcgctctgtgtggtaagccgccggctccgtgttttcgtacgagcgtttgttgccgctcgacaacgcgcagcttttgaaaaggccgagcaacttcgtttgttgcgtgaaaaggctgccaccaatattcaacgtatagctcgtggatggttgggacgccgaagagcggtggaggcacgtcacgaacgagagctgctgcttcagcaccgagagcattcagccactgacatccagcgtgtattgcgagggcatttatcgagaaaaagaaccgcaaaagtgcgtcgtgagtgtgatactatgatgcagaagatgatgaagttggctcaagcctactttttggcagtcatgcacatccagcggatagtacgaggctttttgggccgccaagatgcaaagcgtcgagctgtggctgcctatgagctgctgcaacggaagatcgctcgagcgaagcaaattcagaaagcctaccgagcgcacctggctctggttgcgatccgcaatatgcttttccgaggagctactgcactgcagaaggtattccgaggctttcgcggacggcgagaagcgcgtggaattataattgaacgcgcgtacgcatggccgccgcgtattctcatcttgatgaaaaactccatcttcacgcgcgagttggcgattacttggaagcacaagcgcgatgggggcatggtaattgctgtaattctgcaacgaagataccgaggcttttgtggccggcgtgaagcacgcttggttctagcacgaaagcggcaacgctggtatttggaggacacgggggcgaggacaattcagcatttcttccgcagcatcatgttcgtgcctgcttctgatgtcatcaaacaaggtttgaaatctccatccttatctctgtttatgattgtgtgaacgtagaattctggtacggcttgcaaggtttgaggcgttactatgtctgcggcgacgcagtgcaactaaaattcaagctacatggcgaatgtggctggctaaggcgctggcaaccgcacggcggctacgaaatgaccgtcgacgacagcacgctgcaacgatggaggcaatcgcttctcggcagcaggatcgtcggttgttccttcatcgaggggcggtgcactcgcttgtggtcctctaccgcgcgtcactaacagcccgtgggtggcaaacgccgacatacatcaggatgcttcatcgttcagcaactcggatccaggcgctggttcggggtcacttcggtcgaatctacgcgaattggtttcgagatgagctcacgcgcgcagcagcaatggtacagcgagtgtggcgaggcaaactgggtaagaagatgtggcgcgcactgatggaggagcgacagcagctacgtcgagtgcagggagaaggcgatcgagcagctctcatcgcgcagaagctaaccgcacattatgctctggacgccctcgagcgtgagacgcagcatgctatcgtactgcagcgctggttccagacgttgaagaaccggcagattttccgagaggctcgcgagctccgagctcgtgaggcgcaagcgcgtgcaaaggacaaagtcactgaattgcttcgtctctttactgggagcgttgtgttccaggctcgagtgtggcgcgactgcgctgatcgtaaagcagaactacaagcccttgaagaagacgagtgcgttgctatggagaaggagatcgagcagctgaaagacgcatgcattgaagctcatgccgggtctacgcaggccagtagagagctagtcgagttgaccaaacgcaaaagtgagttcgaacgctctcgaactcgaagaaagcgagccaccgaggcagtcaaacagcgcattcagccttttgcagtgcaagccaagcagctcacagtcgagagtgcgcgcgaactgaatgccaaccggcagcttcagatggagttgcggcgagtgcgcaccgagttacgaaagttccacacgaacttgcgtggtcgcttggtaatggagccgttgttgctgaccggagatgtggagtcactgctggcggggctaactggtcaggacatgtccgatgatgaagacgagcagagctgagtgtatacgcacttgtattcatcgatcacttacttcatcggcacgtgctagcacataccatcagtggagctagcaccccatttttcagagcttactctgctcctcgtacatttcgtcgaagacgctgccgaagtacttgatgagttcgtagcgcttgggcttgaaggtaggggtcgccagtccattctcgggagtgaactgctccgcgtggagtcgcagcttgtgcgcgcgctcaaacggaaggagctttgcagccagcgccagttggcgaaggtccttctggatgacgctgagcagagccttgttccctggggcacagagcttctctagcgaggcttcgcctcccgtgataccttgcttctccgcccacgcagcgacgaactccgggtctggcacgacgatgcccaccacgtagttcttgaacgagtcgccgtgcacgaatacttgagcaacaaacggactttggctgtacacgccctcgacccgctcgggcgccctgcgagagcttgaagatgtttttcttgcggtcgatgatcgtcagcgtgccgtccgggttccattgaccgatgtcacccgtgtggagccatccgtcgtcgtccagcacttctcgtgtcagctctggctgcttgtagtagcccttgaacacgtgaccggatctggtcaagatctcaccccgcgggcacggtgtgtcgcgggtcaagtagtgcttttccgggacatcttcgaggcaaacctgtgcgcctgaaacggggatgcccacgtgcctggtcatgggcatgtcggcccaccaccgcagcagtctccgtgaggccgtatccttccagcacggggcagcagaatgcaatggccatgaactccttcacctccttcgacagaggagccaagccactgaggatgtagcgcacacggccgcctagcaccatcttgagcttgtcgaataccaaccgatcccagaatgcgtgtgtgaagtagccctgtgcaaggtaatccttcttggcagcgtacgcctggtcgaacagcagcttcttcaagccgccagcggctgtaacgccctgcgtgattttgtcgtggatgcggttgagaagccgcggtactgacgggaacacagtcggcttgagctcttgcatgtcgtccagcagcttggtcacatcgccctatagtagccgatgcatccacccttggcaatgatatgcgcttgcacgttgcgctcgaagcagtgagccagcggcaagaaggacaagtgcacgtccgtctcatacaacggcgtgatctcaatggagcacaagatactggcgatcatgttggagtgcgtgagcatgacgcccttggggtcgcccatggtgcctgaagtgtagcagatggcgcacaggtcgtcaggcagcggtgggtcggcctccacggggttagcgcgtccgatctccatgagtcatgagcgacacgttgttggctctggccagactcacgtcctcgccgtcgatcttgtcctcgaactgcacgacggtctccacactggggcagtccttgacacaggccatgagcgtcttgacctgctccttggcgcagaagaccaccctcatctccgtgtggttggtgatgtagggcaccgctttggggcccagcgtgtcgtagagcggcacgagcgtgtacgtcatgccgctggtgctgtgctccaccaccgaccactcgtagcggttcttgctgaagacgcccacgagcgccccgcgctgcagtccgagctcgcgactcatgccggccgagcagttctcgaccgcctcgaggaactcgctgagcgtgacccactcgtagccccccacttcgcccgtctcggggtccactcggcgagtgccgaagagctggtgcgagccatcggggtcgatctccaggcggctcagcagattcgtgtacagcgtgaagctcggatcgaagcccgagcgcagcgtggactcgtgcacggggccccgcgtggcggtggcagtgcccgggacgatgtgcgagtggatcagagtcggctcggtagattcggctgtcatggctgcaggtggggactcgggcagtggaaagagctctcgcggcgacgcgggcgattgaagactggcgtggtcgcgtcaaggtcctcgcaagggatcgctccctgcattgacggggccggatgcgctgacacgcatgacgcatgtcatcagtcgacttcagaattgcgtccttctggcgtaacgtgtgccggttttgtggtacactattatcttttttgaagtgctggtagatcaattcttcaatcaagcttttttttcacgaagaataatgagagttcttaatcctaaggaaatcctatgcttctgtaaaaaaaaaatcgacgagtcgaactgcaactttgaagctctacctacacgtataaagtgcgaccacatcgtcacgaaagtatgaaatgccttgtcggcgtgcgctactacgtccacgtcgagacggcttggtacgtggcgaagaccatcgtgcagaggccaatgacgatcacgatgccgttcagaatgtggccgctgtcgacaagtctgaaaaatatcgattgcgtgtcagtgatgcgagcgtgaatttagacagcaccacagtggtgccaccacctacataccttgagtggaaaatgcaggggtatatgaatgcgagtggcacagagcagaatccgccaatgatggagacgaagttatccagctgcatcccagcagcaaacgaattagtttcgttatcaagaaagaaaagggagaaaacgctgcgtacctcatccttgccgaaatacccgatgaccgctgtaagacatacaagtgcaaagcggaaagcgttctttttccatctccagaagcccttgacacgctggtacggaaacaggttgctctcaaggatgtttatcaccgggtacaacatcaacgggtacgacagcaccaaagccagcgagtacgtaagctgtacggccatagtaccggtgctctcgcttgagctgggcaggttcagcgtcaccaccgattgtgtgttctgtccaaaggctgcgtacacagtaccggcaaacagcgtgcaaattccgagaatacaggcaacgcaccacgacaaaatggtcgggaacttgtgcttgatctcgtcgtccattgaatcgtaggtaggaagcaccagaccgattccttcaaagcagtagactgcaacaccgaggaacatcgcccagttttgagagttgaaatactcccacgtcgcttcccctggagccgcactctcgagggtttccacggtgtaagtgagaatgtagaccagtccgaacacgatcagcacgtcggcaaataaacttgtgagcgcaaagtactccagccgacgcacccacgctagtggggtgtacagcgggatttgcagcaaaatgagagtccacgatgacgtcgtgatagagctccgcaggttaaacgcgtgcagtaaaacttcaccgatgtttttctccacgaaaatgagatacgagcagcagaagccaatttgagaaagcaccagcgacgtgttcactgcccggcgacccatagcaccgaacgctttctcccccacgacaccatacgacacgttgtggtggttgtgagagcgaggcactacgctcgagcactcgaccaaacgcagcatgcagaacgttgacagcgctgccgacacacaaagtccagcgactgagaacagcatgcctccgttctggaatcccttgggcaggaacaggatgccgctgccgatgaacgacttgacaatggtgaaaaccgtcttcttgacggacgctcctcttgtcgatgtctcactcttggctgtctggaaagtgtcgtggctgctaaacaacggaatcagctcttcctgcagcgagcaacgtgcaaaatcaagcggtcagaccaacaaagactctagcataagccattcacacgaacaggcacccacattttcgctgtactcgtcgcccagatgcagtgtgtcgttggcgaagcctcggtaggtatactgcagcaagctgtcgggtccgatggacgtcaggaacgatttctgcgcgtaaattggcaccacagtttcgccggcgggtaacttggccatgacgtggtcacggcggaagcctccaggctgcgcaatgtccgacgccttgcctgtcgtccatacaagcatcaacaccatataagcaccctcctccccttcaatccagcacagcagcagactaacgtaccgacatctttgtagagcacctcgctcacgtccggcagcgacttggtgcgcaccaagccgtcctgggagcccttgagcatggcgctgtagatctcgcgcgtcatgtcggacccctcctccgagatgtcgtgcacgtgcgcgggcgtgcgcaggtcgctgtccttgggcgagaacatggtgcgtgcagcagcgcaatggcaagtgtgctgtaccggcgctgcttgcctcttggctggcgccttgaagtgcatggcgacccaaccaaagccgccgccgaaactgatctcgtgccccttgggcggccgttatgcgaacgtcaaactccatgcttgcgtccagcattgtaggtgctcaaagcgtctcgagcgagaagcaagtccagcaacgaggccaagaacagctcgacgcagtgcgcgaggagcaggatcgagtgagagagtctactttcgactgggctgtgctactggacgtactgagccatttggtcgtgcactcgctgctgggctcgttccatgcgttcgccccgctctcacagcgcctgagcgcggagacgcagcagagcatggacgccatcttcggtgaccagtatcgcgcggtgctacagcgcggggaactcctggagatcgatgaggcggcgctgcagcccaactcgcgctttcggtcctgggctgcgatggtcgagtggagcaacgttcgtcccattgagaacacgcggcaagacgtccgccagcgtctcaaccgtgctgactggggcgttgatccttaacgagcccggatgaaaactgtgagcgcgcgtttgaagacatcgcgcgtgacgcgtccacaggagcgcgccctcgagcaggagaagtcccagctaaagaacgagctggagctgctcgagggcgaggatgcgttgctcatcagaaacctgtgatttcggcgaatttaactcttcaataagagaagcatctagcttgggtaatgccgctgtatgaagcgctaaatgtatgtagatctcgagcgatttatcctcaaagttggcgttgcctggcgcctctgcgatgtttcttaccgttatttatgcagcatataaaaagctatatgtctttgtgtgaccttcaggttgggatgaaagatcccgaattactagcgataagatgactgacaaatagtaagggggctacgctccatgtcctcgttgccgaacggggcaagaaaaggagaaaccactttggcattactcctttgatggacatattagtagatatgcaaagtttcagcattcctagactcgccaggaaaaaccgaatttattcttttcccgagatcccgtacattattgttgaagagacgtgccagttagtatttgggatttaaaaacctcaaatactcccgtaaaaaacagaagactttatactacggaattgcaaatgattagcttttggcgtcgcagcgcaacgaagagaacgctttctaaatgctgaaagcgctcgaataatggtccaacacagggacggtaggaaccgtctactgggttcatttgccttattttgtgtcaggtatctttgtaagcttgagctgccaggacagggtggggaaatcaagggtgggggtggacttttgaggttgcaaattgactaagagaatgtttgctacggcccattgttgcttggatcaggagacctttgctacgggttattgttgttagatcacggcaatctttgcgtatcaggtctcttttttagtagatgtaaggaaaacatattcaatcagcggaactgtcaacggtaagtaaacgtgggcgcttttcaatattgaggttgttccgcatagccaacgaacatcacgacagcactgactgtgatgcaccttaatgttactacttgggattcttatgatgacattgaagcaccagtatcaacatcggaaataagtgggtgaatcatttgacttgagtaaagtatgcgtcccataactcccatattcaaatccagaattctcccttgataagcgactttacggggccctttaaggagggctgcctccgggtgaagactgtaacaccgcgaacgtcaaactcttcgaacctcttgagatgctgctgcccgactgccgcgacgtgttcgccgaggagcactcgctgctggtgtgcgcgcgcagcctgagcttcggcaccttctgcctggccacgctggtcgcgaccgtgtacgcgttccagcgcatcctgcccattttcctgagcgcgcagtggtacctgaccaacctgagccagttggcgctcacggggctgcagatggcgctgctggtctacgagtgcttcgtgctcaacagccccaagatcctcgtgctggccaagtacttccgctgcatgcagatcgccatctcctgcgtgctctacggcaagtccgcgggggagctcgtgaaccgcaccaagctggtacgtgtgggggaagggggggggggtactggggtgcgagtgctcacctttctttcacagttctacagcatgttgatgccggttgtggcgctcaccacagtcgccatgacagcggacgcgctgctggtagttggagcctacgacaagatcgactgccaccacatcacgtggatggccatgtcagctacaggcgtgattctcacaggtacgcgcgtcagtcagtggatggagcccttcgcttgagagagtgttcgcattaaccatcgtctccgttggcagccggctttgccatccctggtcgaatagtcctcgaggagatcaattcaacggcgaggaaacaggtacgagacgccgcttggattattggacggtggtgtgttgcagcacgtgttgacctttcactgtcccagcgtaagaaattccaggactccgccgagctgacggagctggagcagtcgcaccaccagctctgggttctcctgatcgtaagtgctccgccgctgctcttcttgggttttggaagctaacatatcttgcgcgtgtttatctccatcgctggcttccgcgagcagtgcaaccttgtgagtacaggtctgcagctcggcgtcgacgcgtatctctcctttagcgtcggtggtaaggatcgctgctggtacttgaagccattgtgtccactgcgtgtactaatggagattgacaggcgacaagcgcgagtgcgacagcatgttcttcgacgagaacggcgggctgatcgagcagtcggttcgcttggcgatctccattgggacgtacttggtgcccaactggggtgcgctctacgtgttctacgtgctgccgcgtttccagttctccacggtcttggacgtccctggcctcgtgatggacgacgagcacgaggaagcattgtatgagctgcttcctgctgacgagtacgtgtcgccacgtcctagtagcggcagcagccgaggcagtaggcggttctactgatgggcactacatgtatgccgatcattgatcggtcggcgacggctagccggtaaagagcttctggggatgcaagtgtaccgctggacaagttggtccgcagcagctccatcctgtgagcgcttggcccaagtgacgtcgaagcgacatcacgccagcattttttcgcgtgtcgagtcaacgctcaatggacgcagtgccgccttgtgtaggttgggtgcgttgagcacccacaatgtacctactcggtgctgcgggtctgggctcgtgctcattctccaaaaagccaccaatggcgcactggaggcgcctcaagcaacgcatcacggccgcactgggtgaggtgcggttactcaccttcatcgtcctcgacgacgaccgtgcctgtcttcgcgtgcgctgttggctcggacgtgcgaaggagcccgtgatcatgcgcactttcagcctcctgagccacgccgacatcgcagccaccctcccgacgctgcaggagtgcatccagcagctggggcagtttgtgcagaacgagcatgagcagttcctcgccgtccgtgccctggagcgtctcgagcgagaagaacgccggcagcaagtccagcaacgaggccaagaacagctcgacgcagtgcgcgaggagcaggatcgagtgagagagtctactttcgactgggctgtgctactggacgtactgagccatttggtcgtgcactcgctgctgggctcgttccatgcgttcgccccgctctcacagcgcctgagcgcggagacgcagcagagcatggacgccatcttcggtgaccagtatcgcgcggtgctacagcgcggggaactcctggagatcgatgaggcggcgctgcagcccaactcgcgctttcggtcctgggctgcgatggtcgagtggagcaacgttcgtcccattgagaacacgcggcaagacgtccgccagcgtctcaaccgtgctgactggggcgttgatccttaacgagcccggatgaaaactgtgagcgcgcgtttgaagacatcgcgcgtgacgcgtccacaggagcgcgccctcgagcaggagaagtcccagctaaagaacgagctggagctgctcgagggcgaggatgcgttgctcatcaggcgcgtccgccagtatcgactgaagccgacgcctgagcaggcccggcagctcaagaaaacaatggacgcgtgccggtacacgcacaacaagtgcgtcgagtaccggcgcaagggtggtgatggaggcaagaacatgctccagaagttcttcgtggcgcggcccaggctgcgccaagtcccgctggagtacccggaagacatggggccggcccccgagtgggtgctggagacacccgcctcagcacgctgtcagaaactttgtgtccgccaccagcgcggccttcacgaacctggcgcgcggccacatcacccacttcaacatgcacttcaagtccagacgggagagcaactacttcacgatatgcgcggacgcgcagaagactcacctcaactcagcacgacacgcggcactttggtccagcgccacttccccgggaccgcaagcctaagaaggtggatcagtacctaacgatcccctccgtacccaacatcctcatcagagcggacgagggcacggaggtcgagggcgaggtgcgcgtcgtgtacgcacacggatactggtacgcccagatgccgcacgtggtcgctccacagcccgtggaggacaaagggcgctgcacgcgggggacccgggtctgaaggggttcctgaccacgatggacctgcagggcaacatcgcccaccttggccgcgccaactgggagcgactgttgaagctgaaggaccgccagcgagcggcccaacgccgaatgagcaggttcgtggcgaacaagaagtaccgcaagcgccaccacctcggccgccacacaggccgagagtggaagcagttcgtggcagctcgccgcgagttctacaccgtgacggccaagctgggcaactacgtgaaggaccttcattacaaggcagcttcacacctgtgccacaacacggacgtgatactgctgcccaaattctcgacttcgtccatgttgcgcccaagtgccccgtggacgcacgcgttcaacgaccagatgaacacgctggcccactaccagttccggcagaaactgctggcgaagtgcgaggtggtgggcaaggccatggtgctgtgctctgagatgtactcgagccgcacctgtggtcgctgctgccgcctccacctcacactgcgcaacgaagatgtattccggtgcccccgctgcggcttcctggctggacgagacgagaacgcggcctgtaacattctgcggctttctctcggtttacgcagtgaatggtgtagtgcagttgtagttggtagtgtagttctcgggttacagcgagcatgcatccgaagcgctaggcttggcggggtgagtcacctccgggtgaagacgtgtaacactgtagcacatggtgttgacactcatcacgccagcattttttttcgtgtcgagtcaatgctcaatggacgcagtgccggcgcccttttcgctgtctgctacactggacgccgccgctgtcgagcgcttgatgccctgacgccttgcctgcgctcacctcggacggacggcgcgcgaccacaagctagtgccgatccttgcgagcgcaggctcgtatcaacgcgccatgttgaagctggcgccgcgcccctgtcgaatgcgatcatactggagccaagtgctcgacaaactcgcactctcagaatagccgccgaggtcgcacacgccacaactccgtcaactccccgacctgtccggcatgagccacgactccgcccgcctgctgggccccgcgccgcccgccaagtcgcccatggacctgtcggcgcacgacgtggccatggtgcgtctcggccgcggctcgacgttccagcggtcgcacagcaagcccgagcacccgacgtcgcagatgggggcggccgccgtggacgccgagaaccagcgcgccaagcgccacaacggcaagacgcttctcttcctgcgcaagttcagcgtgctggaggaggacgtcgtcatctgcaaccgcgtgcgctgcggcgtggacccgtcctggttccagcaccggaacgccggcgaccaccggtacctgcgcgcgctgagcttcgaggaggccaggctggcggctacgcgtcgtcgccgctcggtctccatggccgcggcttgcatcaagaagacacaaagcatgcgcatcgacccgagcgacctggaggacgtcgaggagctggttgcggacgcggctgcctcgaagaccgactcaggaggtagcaacacgagcacggagcgcagctcgttcaactccgccgtagctagtgcttcttcatcttcttcttcatttagtggaggcgccacctcagagatgtcattgaaaacgggagggctgatgcgcagtggctcgtcacggacgagcgtggcgagccctcgcatgcggacggtgtccgagagctcggcgctgctgaccccgcgagagaaggcaatgcacggccgctacctcatccgggagtcctttgccgctggagcgtatggcaaagtgtgctcaggtcaggacaagtcgtccatggaggaggtcgcggtgaagatcgtccccaagtacatcctgatctcccgcgaggagaagcagtcggtgatccgtgagcaggttatccacaaggggctggaccacccgcacatcgtcaagctgctggacgtatatgaagacgacggcgcgcactacttcattctggagcgcgccgacagcggctcactgaattcgatgatcaccggcgccgggatcgaagagaacaagtgtcgtgagttcttccaccaactgctgcttgcgctcgagtacctgcacggcaacaacattgtgcaccacgacattaagccgcacaatgttctgctggatgacgagggaacgaccgtcaagctgtgcgacttcggagcctcccgtgccttcgacgctcaccagacgtcgttgcccttcgctggcatcttcggaacggtgggctacatcgcgcctgagctgctcgatggcaagccgtcctacggtcctggtattgacatgttcagtgccggcattttgctgtttgagatggtcttcggctacggaccgttctacccgccaagtgcttgcacgcaccaggagttggagttccccaacaggtcgaaggcgtcgccgcaggtgaagcagctcttaagcagattgctggagaaggacccagccaagcggatcacggcaggccaggccctgggtcatccgtggatcactctcaatgctggcggtcgctcagctccatcgtctccagtgaccacatttgccggtaagcctccgcctgctccaatctgtgtgcgtcggtagatcggcactacggtgtattttgtactttgccttatcctcataaaacgcgtaatagcacgtcatgtacaagcacgttacgaacgcagttcttctctagctatgaggaatccatcaacaccagagccatatgcggtgccgatgctgtagccagcgatgatgataacggctgctacaactgagatcaagttgccgatcagtccgcatatcgtggcagcgccgatcaatacgagccaaaacgccaccagggcggtcaacacagctccctgctcctcctggaaaagaggcttcgctccatccgggagtttcccgttcgactcgtagaatgccttcagcattgactccttgcgctcgaaccgttgctccatccacgttgcaagctcgctctcgcttttgtcgcgcagcgccgaaatgtccactcgttcgatgtagaagtggatcattctcggcacacgaccgctcagcaacgatgcctccgatgggcgctcgttcgcggcgtagtccacgtagaacatcgtgacatcgtatacagccgtaagctgtgagcgcagcagcgggaagatgaatgtccagccagtcgtacgcgggtacaatgagtactgacgcggcagcaaaccgttcttcttcgcaaaggcggcgctcttctccaggttgctttcactgaggtccgttccttccgggaacaggaggtatgaggcctccggttctgcggatgataggaacggcagcaacttgcggaggttcacctggtcatcagcccagcggcgttgctgtgtaatattaaaaatggttagtgtaaggcgtactttggtaccgtagcaagctatcgtaccagaaaaatgaagatgaagtgctgcatcgcccaaccgaagatggggattttccgcagcggagccttgaggacgatccgcaattgatgcagcgtgcgagtccgccacgccacgctccacagcagcatccagtcgatgcgcgtgcggtggttcgacagccacagcgctcgatcttgcggcatttcgttctcgtgcttcttggtctcagcgtcgccgtacacgcggacctggatgccgaacagtttctctagtatatccccaacagaactcacggtgagcgtctagcagcggcaacttcaacgcacgatcttccacttcaacgtaccaagcagcagcaccacttggcccatccacgcccattgtctgcacacataaagagcagcagcaatacatccacgcacatgtcagtgtcataacggacgctgtgcgtattcctgtcgacgcacatgaagcgagtgacgcggcggtagaagcgcttggtctgcagacccgccggtagaggcaacgccgccagtaggaaggtcggggtcaggacccaggccagggccgtccagcccgtgaccacaagcgacgccaagaacacggccccaccaagagcgatgcgcatggtctccgaccttttatttatgaatcagccaatcagcgggcgcggatgtggaccacgcagcctcgcttgaaacttgaagagaaggaatctgcagagaaagatgacgacgagggcggaggcggagcgcgacgtgaagctcctcgtgagcttagtggccatggtcttcgtgggcctcggcaacaagagtgcgcgcttctcctcactctgcgcacgggagaattgggagtaaactgacgcattgtttctccctcgtttgctacatacagtcttccagaagtgcgttcttgaggctgtggctgcttagttcgtgcctggggtctaatgatttattctctccatgccggcagactgcagaccatccccatgcacaactacccgacgttcctgaacctgctcaccacgttcgtctacgtgcgtactgcgtgcgccccttggcgttgggtctttcgagtgcgtgcaatggcttttactgatctcttgatgcaactgcctgcagattcctatcagcttcgcgtacatcctgccgatgatcaagtacggaagtgccatcacgtgggaccagcgtagcattccaaagcgcaagttcgcggtcatgggaggactcgactccattgccggaatcctgcaggtgtttgcagccacgtacctgggaggatcccttatcatcttgctgggccaggctgcgatccccatttcgatgctgatctccagtctgctgctcaaggccaagtactctggctaccagtatgttggcgcagtggtcgtttcactgggtctgctcatcgtgctcgggtctggtgcctctagcagcagcagtggcaccaatccgcacctcgtcgtgctgtggtctgttgttatgatagtcagctgcgtccctatttgcctgtccagcgtgttcaaggagaagacgctgggcgaggcggagctagatgcagtctacctgaacggctggatcgctgtcttccagttcctgtttgcaatcccgctgacgtttcccgcggcaatggttggcgatcacccagttacacccagagaactcccagaaaatctgtacgacggcttgatgtgctacctggggcagaacaccatcactgagggtggacacaaagacgactgcgagaaggccaccatttacgtgacggcgtatctgctgttcaatgtggcatacaacctgctgattatcctgattctcaagttcggcagcgctaacatcctctggctggcaagtgacgctgaaggggattgtttcaggtatttttttaaccgttgtgttttgtgttgtgttttgttccaggccatgacaattatggttccgctcggcaacgtcgctttcacgttcccattcatgccgcagcaccagccactgcacgcgaaggatatcgcgggtttgttgttcatcatgtcggggctcttcgtgtaccggttcctggaggagctcatggactcgtggaacaagcggaagcccgtctacccggacgagaagggcccggcggttgacgaactcaagcgtgcgctcatcagcagcgacagcgacaccagcgacgacctggagcgagacgtgtagaggttgaggacagttccctctagccgctagctctacaaacctgtccgcgtcaccgagatggactttgtcagcctatgggcgagtgctgccgacaatatcaatgagtgaagttattcaatcctcctacaactaacgatagatcgctagttatcatgggaagtatactagatactaataccatatatgttgtacgcgaaaactagctgtaagtggcacgagggtactgtaaacaaaggcatatatcgccaaggcgtaaatcaaaacgtaatcactcaggcttagggtatggtgtgcaccacacagtgcaccggatggccatcgagctctattgaccgcagaacccggggagctcctgaggcacatcgctgaccatgctggccgccgtcaccaagagcttcgtgcgcgccgcgggcgccgcctcgacccgtcgcgcgcctctgctgagcgcgcaggtgtctctcttctccacagaggcggccacgcccgcgcccgcggccgagcagcccaagcgcaccaagctcaagatccccaccaagcgcgcggcgtcgctgctgcagcagctggaggcggaggctgtggccaaggccgcggagggcaaggacattgacaacttcaagcccggcgactcggtggaggtgcagtacctgctgagccgcaccggcagccgcgtgcagcgcgtcaagggcgtcgtgctggcgcggcgaaaccgcggcacgggcagctccttcgtcatccgcaacgtgagtggagtgtgcgcgcgggaggtcctggcaagtttttgcagtagactgactggttatttgtgttgttgttgttgttgtttggtgcagcacattggcggctacggttacgagcagaagatcttcctgcactcgccgctgctgcagagcgtcaaggtgctgcaggaggcgttcatccacaaaggcaagaagcgcgtgcgtcgcgcaaagctcttctatctgcgtgagaaggcgcccagcttcactactgtctaggcgctgcggctacgtcagactcgtcggaactggcaacgtcgtggccatcgcagcagcgctctgtctagcgagcgaagctgcgtggatgtaggaaaagcagcgcgagtaggaaaggggtcggcagcgttaacactagagaagaaaaacgattcacagaccgcacaagctgcgcacaggaacaggttcgtctgttatcggcaaggatggaggttctagccaaatcgctgcgattcggggcggcgacttcttctagcgtcagaggcgcttcctctatctgcgtttctttttcttggacttgcgaatgccagagtcgctagacaccacgacggcggcaggtttgtccgactcggccttgcgggcagcacgggccgccgcatccagctttaaagcgtccttctccgtgcccatgccagctccctgcgcaccgacgaaacggttgcgaccacgacggccacgcttgccatgagagcgctgcttgcgcgggatccagcgctccgggtccgggttcacgaggccaatagacgcgttgtagtccggacgagaacgcagcttggtcagatgcgcctccctgcgcttggcccgcttgcgggcgatgctctccgggctcttggcggcacgcttacgtctggtgaacaggaaagacaacacagttagaggtgcggatacgaacaggatatggtgagcaagtatccactacgcactcgttcttcttgtcgccagtgtccgcaaacttggcagccaaacggttcgagcgaggagcctgcttctccagttcacttgggtcgactccgctttcctccacagcaggcagcatggcgcaacgcgcctcagcagcttcggcatcgcagaacgacctgcatacatgagcaataaaggttagaactgcagataaagtagggcgcagctcactgggcgacttacagagcaacaaccaacgaggccattgaacgcagacgcagatcgcggtccatagcaccagcagtctcgccttccagcagctccaagtacgcgtcggcagcttcacggtactgcttcttctgaatcttgtaccagcagtctccctcacgaatcttcatagcctgctccgacgtgtagttgccagccctgtggtgaatcaacgcgcgttccagcacggcctgagccgacgccgagtcgccagcttgctcgtagagagcaacaagggtggccactgtacccggcgagtgcgccagctcctcaatggagcgaatgcactcggcggccttcagcacgtgtccttcggtcaagtacacgtgcgcgaggccaagacggccgcccacactcatatcatcctgaatgtacacggatcatattagagtgtagagttgagcttagtactgctgtgatccaagcttggacgctaaacatttcgtacctgcagctgttcaatagcagctcccggagattgatccttgattgctagcaggaccacgatgtcagcaatcgacttcgacgcggggaactgcttcttcaaagcttccaagctctcgcggcattcctccgtctagaaatcgttaggttcaccatttgttagaacgtgaggaaaacctgatactgctaagaaggcaagacgcaccttgttcatgaggcacagcaacagcgtgcggttcgtgagaatggcctcctgctgcgtagggttcagcttgtccgacaacaccgcggtatcgatattcttcagtcgcttgaacgagtccagcacgtcgcggtcctgacggattgtcacgatgttgttcgaagccacagctcccacagcacggttacggagcctgcagcaacatcaaagctaaaagttagcaatgaaaacacacagcagagatgcaacaacaacgtagcgtacttcagcttcaacacgttgcggtagtctgagagggcatcatccagattgccacgcatttgcttcacatacgcaagctgcgtcttgatgacggccacctcctcttcaatctccgcctccgaagctccctccgccacgaacgtatcacagcacaagcctgttattcccatacaaaaggtcagtacgtcacgttggcacgccagtacagcagactcttcttacgctcggcggtcagcaaaagctcctccgccgcctcccaatcactggactggatagctacgaacgacttgttgaaggccacttcgaatccatcgtcaatctgtgatagcataagacaaccagcttccgtattagcagcgattcccctccgcgagcactcctcctcatagtccgcttaccggaatctcgcggtccttcagttcctggcttctgccggcgctcgcgtacgccgccagcaggttcgtctgcaactccaggaggtcgtcaccctgcaatcacccagcacaaaatccattctcgttagcacttgtagggtagtcaattcccccatgaccacacacaaatacgcacctccgggccgcgagagagcagcagttcgtagatgcggatgctctggtcgtagtcgcccttgcggaagtgcttcagaaagagagaaacagcgtcagatccccgcgatccctccaccttcctagtcaggagtcggtcggcgtaccagttgcgccgccaggtgcagctgagccgtgctctgggtctccaggtcgccaccacccagcagtttcagcgcgtcgtcatcctgcttgaggcggtacaggcagtaggccttctccgtgctgaggaagtcgtacttgacggcaagctccagcgccttgtcgaactacagaggagacatggagcacgcggcgtgaggatccgaaggaaggaaatagtgaaggggtaacacagtccgcaccttctcgagacggatgagcgccacgcacttgaccttgacggcgtccacgtcgtccggcagcttggagcggactgcagcacgaggcatgagcggggtcagacacagcgcgttcgattcctctgcgcatggtacgagctctcacttttgttgcaaatgtccacagcgcgcgagtagttctcgcgcttgagcgcggcgttgagctccgagaagctcgcggccaccgcagcgtcggcggagacggtagtcgccatgatgctgctccccctttggtgttttgtgttgggccacacatggatggtgtttcgcacaccaaatgtgcatgtggccttcagaaaatcacgcaaatcgcaaattcgacaaacgcaaatcctgtacagtaatctgcccgagtaaggaacgcctgatatatataaaagacgcagaatatattgtgccttgcatgctttctgactaaacaacgacgtaattcgttgttttagcaaatcacggtgattagcccatcattgagttaggaggctaactcgtcgatttaagatagaatagctgctaagacaacgagttaacgttgagttatgctcactttcgttgaatggctggagtaaatccgacaatactacggccctgacattctaattctaactcgctcgctttgtctgattgctttctagtcgatgattgacatgcgttggcgatctatcgtagtactaaactacgtctacaatattgaagaacatccctgtttttatatcgaggagctgcaagcagctttaaagtcagcgtttcctgcactaccaaacatttctagtagaaaatttctactgctactatatgccgtgctctgaaattcgagcttggtttaacgcgcaaggccacgacgaagagagcgaaagaaaacgtccccgccgaaatcggtgcttactattatgcaaggagttggcgccattctatcggggatcttatcggtttgttttcttgcagcgacaaccgatttattcttgcagtggcaaccgctccgttcttgctctgcgttgtgtttggtactggccgttgattagcttaactttaacttagagttaggctgcgagatatgatcaccgggaaggatttgctcgttggtttagagtccttaatcgcatgccaaagttcgtgcaaagcacaatataaattgatgttaagttgagtatacttttccaatgcactgatttagttatttcaaaatgaacagaagagcagctttacctacgagtccggaatgattccaacagtggcgtatggtcgaagcactaacctttgaccaggcatcctcgcaccacaacagcgctgtcaactggtcgacctcgtagggactatctagcccttcaccaagccggtctagagcctgcatcatcttgcggaatagaatgtgtcgcttaatacaatgaatgattccttggtccttctccagcggccaccccagcaggactgcacttgacttgattatgcggcatatcgttgtcttgcctggggcggccgggaggctgaactccgtgtcagcccactcagccaggcccctgttggagagagcaggtgtgcgggctgccttgtcgaggatgcccactttctcagaccaagtgaggcggagacgcttggacggtgtggacttcatgggtggagtgggggaggaggtgggcttgtggggcgaggtgcaaaagcaaaagtgcgagtctaccactacggtacatgtagtttgaagtctagtaagatcgctaaatgcgcgccatttttcaaacgagggtggagagctgatgattggcactggatttttcaccttagtacctcagtaccttgcactaccttgcacatccccctatcgccccatcaactggaaaataatattaaatatgtgaggctattagttatacacccgtttcttatccgggcagaattctgtagcaaaatgcgccgatgcgctcgcaaaatcagtcgcaatttgcggagacgattttggagtctctgcaaattgcgagtgattttgcgaatgctattcgatgcacttaccatcgttttcatacattgtaatgcatatcactggattgatcgttatcgctactgtgttttccgctaagccctggagttgcaatcctctccatagactatttgtcgccgcctaaccttgcctactctgtggttgcattttgcttgtgattttggcgctcacaatcccaacgcaaatccaggtgtaggtgaacgcaaaatcgctctcaaattgcgccgaaatgtgatttgcgtgattttctgaaggcccccattatctccgctcgtagtggacatccttataaaggagctgccaaccatgtaggactgactatgctagatagtcagccatagatagtaggaataggcggcgctgccgcagcaagctttcaagacagttctcattcttaccaagaagtctttgacttgtttcgcgggtcctcggataagaccctggttggactctttgagtcggaaacctttcctgtgcgctaccgcaaccccgctgcaaatttacggcaacatgctggcatgtgcagccttgtacaacagacgatggagagtgatcgtgcagcaaaattcaagcaagacaacgcgctacaatatcgaaattctactatatatcgtttcatctacgttctcataggtgattatcatgtttacgaggtatacttcgtacttagtatttatctgctggatacgacaattgctataaggttttggtcggcatcatcggttgtagcaaacacgacgcaaattgggacgtattgggggacttcagaaaatcacgcaagtcgcaaattcgacaaacgcaaatcctgtagcaaaatgcaccgatgcgctcacaaaatcagtcgcaatttgcggagacgattttggagtctgcaaattgcgagtgattttgcgaatgctattcgatgcacttaccatcgttttcatacattgtaatgcatatcactggattgatcgttatcgctactgtgttttccgctaagccctggagttgcaatcctctccatagactatttgtcgccgcctaaacttgcctactctgtggttgcattttgcttgtgattttggcgctcacaatcccaacgcaaatctaggtgtaggtgaacgcaaaatcgctctcaaattgcgacgaaatgtgatttgcgcgattttctgaaggcccccattatctccgctcgtagtggacatccttataaaggagctgccaaccatgtagggctgactatgctagatagtcagccatagatagtaggaataggcggcgctgccgcagcaagctttcaagacagttctcattcttaccaagaagtctttgacttgtttcgcgggtcctcggataagaccctggttggactctttgagtcggaaacctttcctgtgcgctaccgcaaccccgctgcaaatttacggcaacatgctggcatgtgcagccttgtacaacagacgatggagagtgatcgtgcagcaaaattcaagcaagacaacgcgctacaatatcgaaattctactgtatatcgtttcatctacgttctcatatgtgattatcatgtttacgaggtatacttcgtacttagtatttatctgctggatacgacaattgctataaggttttggtcggcatcatcggttgtagcaaacacgacgcaaattgggacgtattggggaacttcagaaaatcacgcaagtcgcaaattcgacaaacgcaaatcctgtagcaaaatgcaccgatgcgctcgcaaaatcagtcgcaatttgcggagacgattttggagtctgcaaattgcgagtgattttgcgaatgctattcgatgcacttaccatcgttttcatacattgtaatgcatatcactggattgatcgttatcgctactgtgttttccgctaagccctggagttgcaatcctctccatagactatttgtcgccgcctaaacttgcctactctgtggttgcattttgcttgtgattttggcgctcacaatcccaacgcaaatctaggtgtaggtgaacgcaaaatcgctctcaaattgcgacgaaatgtgatttgcgcgattttctgaaggcccccattatctccgctcgtagtggacatccttataaaggagctgccaaccatgtagggctgactatgctagatagtcagccatagatagtaggaataggcggcgctgccgcagcaagctttcaagacagttctcattcttaccaagaagtctttgacttgtttcgcgggtcctcggataagaccctggttggactctttgagtcggaaacctttcctgtgcgctaccgcaaccccgctgcaaatttacggcaacatgctggcatgtgcagccttgtacaacagacgatggagagtgatcgtgcagcaaaattcaagcaagacaacgcgctacaatatcgaaattctactatatatcgtttcatctacgttctcatatgtgattatcatgtttacgaggtatacttcgtacttagtatttatctgctggatacgacaattgctataaggttttggtcggcatcatcggttgtagcaaacacgacgcaaattgggacgtattgggggacttcagaaaatcacgcaagtcgcaaattcgacaaacgcaaatcctgtagcaaaatgcaccgatgcgctcgcaaaatcagtcgcaatttgcggagacgattttggagtctgcaaattgcgagtgattttgcgaatgctattcgatgcacttaccatcgttttcatacattgtaatgcatatcactggattgatcgttatcgctactgtgttttccgctaagccctggagttgcaatcctctccatagactatttgtcgccgcctaaacttgcctactctgtggttgcattttgcttgtgattttggcgctcacaatcccaacgcaaatctaggtgtaggtgaacgcaaaatcgctctcaaattgcgacgaaatgtgatttgcgcgattttctgaaggcccccattatctccgctcgtagtggacatccttataaaggagctgccaaccatgtagggctgactatgctagatagtcagccatagatagtaggaataggcggcgctgccgcagcaagctttcaagacagttctcattcttaccaagaagtctttgacttgtttcgcgggtcctcggataagaccctggttggactctttgagtcggaaacctttcctgtgcgctaccgcaaccccgctgcaaatttacggcaacatgctggcatgtgcagccttgtacaacagacgatggagagtgatcgtgcagcaaaattcaagcaagacaacgcgctacaatatcgaaattctactatatatcgtttcatgtacgttctcatatgtgattatcatgtttacgaggtatacttcgtacttagtatttatctgctggatacgacaattgctataaggttttggtcggcatcatcggttgtagcaaacacgacgcaaattgggacgtattggggacttnnnnnnnnnnnnnnnnnnnnnnnnnnnnnnnnnnnnnnnnnnnnnnnnnnnnnnnnnnnnnnnnnnnnnnnnnnnnnnnnnnnnnnnnnnnnnnnnnnnnattgagttaggaggctaactcgtcgatttaagatagaatagctgctaagacaacgagttaacgttgagttatgctcactttcgttgaatggctggagtaaatccgacaatactacggccctgacattctaattctaactcgctcgctttgtctgattgctttctagtcgatgattgacatgcgttggcgatctatcgtagtactaaactacgtctacaatattgaagaacatccctgtttttatatcgaggagctgcaagcagctttaaagtcagcgtttcctgcactaccaaacatttctagtagaaaatttctactgctactatatgccgtgctctgaaattcgagcttggtttaacgcgcaaggccacgacgaagagagcgaaagaaaacgtccccgccgaaatcggtgcttactattatgcaaggagttggcgccattctatcggggatcttatcggtttgttttcttgcagcgacaaccgatttattcttgcagtggcaaccgctccgttcttgctctgcgttgtgtttggtactggccgttgattagcttaactttaacttagagttaggctgcgagatatgatcaccgggaaggatttgctcgttggtttagagtccttaatcgcatgccaaagttcgtgcaaagcacaatataaattgatgttaagttgagtatacttttccaatgcactgatttagttatttcaaaatgaacagaagagcagctttacctacgagtccggaatgattccaacagtggcgtatggtcgaagcactaacctttgaccaggcatcctcgcaccacaacagcgctgtcaactggtcgacctcgtagggactatctagcccttcaccaagccggtctagagcctgcatcatcttgcggaatagaatgtgtcgcttaatacaatgaatgattccttggtccttctccagcggccaccccagcaggactgcacttgacttgattatgcggcatatcgttgtcttgcctggggcggccgggaggctgaactccgtgtcagcccactcagccaggcccctgttggagagagcaggtgtgcgggctgccttgtcgaggatgcccactttctcagaccaagtgaggcggagacgcttggacggtgtggacttcatgggtggagtgggggaggaggtgggcttgtggggcgaggtgcaaaagcaaaagtgcgagtctaccactacggtacatgtagtttgaagtctagtaagatcgctaaatgcgcgccatttttcaaacgagggtggagagctgatgattggcactggatttttcaccttagtacctcagtaccttgcactaccttgcacatccccctatcgccccatcaactggaaaataatattaaatatgtgaggctattagttatacacccgtttcttatccgggcagaattctgtagcaaaatgcgccgatgcgctcgcaaaatcagtcgcaatttgcggagacgattttggagtctctgcaaattgcgagtgattttgcgaatgctattcgatgcacttaccatcgttttcatacattgtaatgcatatcactggattgatcgttatcgctactgtgttttccgctaagccctggagttgcaatcctctccatagactatttgtcgccgcctaaccttgcctactctgtggttgcattttgcttgtgattttggcgctcacaatcccaacgcaaatccaggtgtaggtgaacgcaaaatcgctctcaaattgcgccgaaatgtgatttgcgtgattttctgaaggcccccattatctccgctcgtagtggacatccttataaaggagctgccaaccatgtaggactgactatgctagatagtcagccatagatagtaggaataggcggcgctgccgcagcaagctttcaagacagttctcattcttaccaagaagtctttgacttgtttcgcgggtcctcggataagaccctggttggactctttgagtcggaaacctttcctgtgcgctaccgcaaccccgctgcaaatttacggcaacatgctggcatgtgcagccttgtacaacagacgatggagagtgatcgtgcagcaaaattcaagcaagacaacgcgctacaatatcgaaattctactatatatcgtttcatctacgttctcataggtgattatcatgtttacgaggtatacttcgtacttagtatttatctgctggatacgacaattgctataaggttttggtcggcatcatcggttgtagcaaacacgacgcaaattgggacgtattgggggacttcagaaaatcacgcaaatcgcaaatttgacaaacgcaaatcctgtagcaaaatgcgccgatgcgctcgcaaaatcagtcgcaatttgcggagacgattttggagtctgcaaattgcgagtgattttgcgaatgctattcgatgcacttaccatcgtgttcatacattgtaatgcatatcactggattgatcgttatcgctactgtgttttccgctaagccctggagttgcaatcctctccatagactatttgtcgccgcctaaccttgcctactctgtggttgcattttgcttgtgattttggcgctcacaatcccaacgcaaatctaggtgtaggtgaacgcaaaatcgctctcaaattgcgacgaaatgtgatttgcgtgattttctgaaggcccccattatctccgctcgtagtggacatccttataaaggagctgccaaccatgtaggactgactatgctagatagtcagccatagatagtaggaataggcggcgctgccgcagcaagctttcaagacagttctcattcttaccaagaagtctttgacttgtttcgcgggtcctcggataagaccctggttggactctttgagtcggaaacctttcctgtgcgctaccgcaaccccgctgcaaatttacggcaacatgctggcatgtgcagccttgtacaacagacgatggagagtgatcgtgcagcaaaattcaagcaagacaacgcgctacaatatcgaaattctactatatatcgtttcatctacgttctcataggtgattatcatgtttacgaggtatacttcgtacttagtatttatctgctggatacgacaattgctataaggttttggtcggcatcatcggttgtagcaaacacgacgcaaattgggacgtattgggggacttcagaaaatcacgcaaatcgcaaatttgacaaacgcaaatcctgtagcaaaatgcgccgatgcgctcgcaaaatcagtcgcaatttgcgaagacgattttggagtctgcaaattgcgagtgattttgcgaatgctattcgatgcacttaccatcgttttcatacattgtaatgcatatcactggattgatcgttatcgctactgtgttttccgctaagccctggagttgcaatcctctccatagactatttgtcgccgcctaaccttgcctactctgtggttgcattttgcttgtgattttggcgctcacaatcccaacgcaaatctaggtgtaggtgaacgcaaaatcgctctcaaattgcgacgaaatgtgatttgcgtgattttctgaaggcccccattatctccgctcgtagtggacatccttataaaggagctgccaaccatgtagggctgactatgctagatagtcagccatagatagtaggaataggcggcgctgccgcagcaagctttcaagacagttctcattcttaccaagaagtctttgacttgtttcgcgggtcctcggataagaccctggttggactctttgagtcggaaacctttcctgtgcgctaccgcaaccccgctgcaaatttacggcaacatgctggcatgtgcagccttgtacaacagacgatggagagtgatcgtgcagcaaaattcaagcaagacaacgcgctacaatatcgaaattctactatatatcgtttcatctacgttctcatatgtgattatcatgtttacgaggtatacttcgtacttagtatttatctgctggatacgacaattgctataaggttttggtcggcatcatcggttgtagcaaacacgacgcaaattgggacgtattgggggacttcagaaaatcacgcaaatcgcaaatttgacaaacgcaaatcctgtagcaaaatgcaccgatgcgctcgcaaaatcagtcgcaatttgcgaagacgattttggagtctgcaaattgcgagtgattttgcgaatgctattcgatgcacttaccatcgttttcatacattgtaatgcatatcactggattgatcgttatcgctactatgttttccactaagccctggagttgcaatcctctccatagactatttgtcgccgcctaaccttgcctactctgtggttgcattttgcttgtgattttggagctcacaatcccaacgcaaatctaggtgtaggtgaacgcaaaatcgctctcaaattgcgacgaaatatgatttgcgtgattttctgaaggtccccattatctccgctcgtagtggacatccttataaaggagctgccaaccatgtagggctgactatgctagatagtcagccatagatagtaggaataggcggcgctgccgcagcaagctttcaagacagttctcattcttaccaagaagtctttgacttgtttcgcgggtcctcggataagaccctggttggactctttgagtcggaaacctttcctgtgcgctaccgcaaccccgctgcaaatttacggcaacatgctggcatgtgcagccttgtacaacagacgatggagagtgatcgtgcagcaaaattcaagcaagacaacgcgctacaatatcgaaattctactatatatcgtttcatctacgttctcatatgtgattatcatgtttacgaggtatacttcgtacttagtatttatctgctggatacgacaattgctataaggttttggtcggcatcatcggttgtagcaaacacgacgcaaattgggacgtattgggggacttcagaaaatcacgcaaatcgcaaatttgacaaacgcaaatcctgtagcaaaatgcaccgatgcgctcgcaaaatcagtcgcaatttgcggagacgattttggagtctgcaaattgcgagtgattttgcgaatgctattcgatgcacttaccatcgttttcatacattgtaatgcatatcactggattgatcgttatcgctactgtgttttccgctaagccctggagttgcaatcctctccatagactatttgtcgccgcctaaccttgcctactctgtggttgcattttgcttgtgattttggagctcacaatcccaacgcaaatctaggtgtaggtgaacgcaaaatcgctctcaaattgcgacgaaatgtgatttgcgtgattttctgaaggcccccattatctccgctcgtagtggacatccttataaaggagctgccaaccatgtaggactgactatgctagatagtcagccatagatagtaggaataggcggcgctgccgcagcaagctttcaagacagttctcattcttaccaagaagtctttgacttgtttcgcgggtcctcggataagaccctggttggactctttgagtcggaaacttttcctgtgcgctaccgcaaccccgctgcaaatttacggcaacatgctggcatgtgcagccttgtacaacagacgatggagagtgatcgtgcagcaaaattcaagcaagacaacgcgctacaatatcgaaattctactatatatcgtttcatctacgttctcataggtgattatcatgtttacgaggtatacttcgtacttagtatttatctgctggatacgacaattgctataaggttttggtcggcatcatcggttgtagcaaacacgacgcaaattgggacgtattgggggacatcagaaaatcacgcaaatcgcaaatttgacaaacgcaaatcctgtagcaaaatgcgccgatgcgctcgcaaaatcagtcgcaatttgcggagacgattttggagtctgcaaattgcgagtgattttgcgaatgctattcgatgcacttaccatcgttttcatacattgtaatgcatatcactggattgatcgttatcgctactgtgttttccgctaagccctggagttgcaatcctctccatagactatttgtcgccgcctaaccttgcctactctgtggttgcattttgcttgtgattttggcgctcacaatcccaacgcaaatctaggtgtaggtgaacgcaaaatcgctctcaaattgcgacgaaatgtgatttgcgtgattttctgaaggtccccattatctccgctcgtagtggacatccttataaaggagctgccaaccatgtagggctgactatgctagatagtcagccatagatagtaggaataggcggcgctgccgcagcaagctttcaagacagttctcattcttaccaagaagtctttgacttgtttcgcgggtcctcggataagaccctggttggactctttgagtcggaaacctttcctgtgcgctaccgcaaccccgctgcaaatttacggcaacatgctggcatgtgcagccttgtacaacagacgatggagagtgatcgtgcagcaaaattcaagcaagacaacgcgctacaatatcgaaattctactatatatcgtttcatctacgttctcatatgtgattatcatgtttacgaggtatacttcgtacttagtatttatctgctggatacgacaattgctataaggttttggtcggcatcatcggttgtagcaaacacgacgcaaattgggacgtattgggggacttcagaaaatcacgcaaatcgcaaatttgacaaacgcaaatcctgtagcaaaatgcgccgatgcgctcgcaaaatcagtcgcaatttgcggagacgattttggagtctgcaaattgcgagtgattttgcgaatgctattcgatgcacttaccatcgttttcatacattgtaatgcatatcactggattgatcgttatcgctactgtgttttccgctaagccctggagttgcaatcctctccatagactatttgtcgccgcctaaccttgcctactctgtggttgcattttgcttgtgattttggcgctcacaatcccaacgcaaatctaggtgtaggtgaacgcaaaatcgctctcaaattgcgacgaaatgtgatttgcgtgattttctgaaggcccccattatctccgctcgtagtggacatccttataaaggagctgccaaccatgtagggctgactatgctagatagtcagccatagatagtaggaataggcggcgctgccgcagcaagctttcaagacagttctcattcttaccaagaagtctttgacttgtttcgcgggtcctcggataagaccctggttggactctttgagtcggaaacctttcctgtgcgctaccgcaaccccgctgcaaatttacggcaacatgctggcatgtgcagccttgtacaacagacgatggagagtgatcgtgcagcaaaattcaagcaagacaacgcgctacaatatcgaaattctactatatatcgtttcatctacgttctcatatgtgattatcatgtttacgaggtatacttcgtacttagtatttatctgctggatacgacaattgctataaggttttggtcggcatcatcggttgtagcaaacacgacgcaaattgggacgtattgggggacttcagaaaatcacgcaagtcgcaaattcgacatacgcaaatcctgtagcaaaatgcaccgatgcgctcgcaaaatcagtcgcaatttgcggagacgattttggagtctgcaaattgcgagtgattttgcgaatgctattcgatgcacttaccatcgttttcatacattgtaatgcatatcactggattgatcgttatcgctactgtgttttccgctaagccctggagttgcaatcctctccatagactatttgtcgccgcctaaccttgcctactctgtggttgcattttgcttgtgattttggcgctcacaatcccaacgcaaatctaggtgtaggtgaacgcaaaatcgctctcaaattgcgacgaaatgtgatttgcgtgattttctgaaggcccccattatctccgctcgtagtggacatccttataaaggagctgccaaccatgtaggactgactatgctagatagtcagccatagatagtaggaataggcggcgctgccgcagcaagctttcaagacagttctcattcttaccaagaagtctttgacttgtttcgcgggtcctcggataagaccctggttggactctttgagtcggaaacttttcctgtgcgctaccgcaaccccgctgcaaatttacggcaacatgctggcatgtgcagccttgtacaacagacgatggagagtgatcgtgcagcaaaattcaagcaagacaacgcgctacaatatcgaaattctactatatatcgtttcatctacgttctcatatgtgattatcatgtttacgaggtatacttcgtacttagtatttatctgctggatacgacaattgctataaggttttggtcggcatcatcggttgtagcaaacacgacgcaaattgggacgtattgggggacatcagaaaatcacgcaaatcgcaaatttgacaaacgcaaatcctgtagcaaaatgcgccgatgcgctcgcaaaatcagtcgcaatttgcggagacgattttggagtctgcaaattgcgagtgattttgcgaatgctattcgatgcacttaccatcgtgttcatacattgtaatgcatatcactggattgatcgttatcgctactgtgttttccgctaagccctggagttgcaatcctctccatagactatttgtcgccgcctaaccttgcctactctgtggttgcattttgcttgtgatcttggagctcacaatcccaacgcaaatctaggtgtaggtgaacgcaaaatcgctctcaaattgcgacgaaatgtgatttgcgtgattttctgaaggtccccattatctccgctcgtagtggacatccttataaaggagctgccaaccatgtagggctgactatgctagatagtcagccatagatagtaggaataggcggcgctgccgcagcaagctttcaagacagttctcattcttaccaagaagtctttgacttgtttcgcgggtcctcggataagaccctggttggactctttgagtcggaaacttttcctgtgcgctaccgcaaccccgctgcaaatttacggcaacatgctggcatgtgcagccttgtacaacagacgatggagagtgatcgtgcagcaaaattcaagcaagacaacgcgctacaatatcgaaattctactatatatcgtttcatctacgttctcatatgtgattatcatgtttacgaggtatacttcgtacttagtatttatctgctggatacgacaattgctataaggttttggtcggcatcatcggttgtagcaaacacgacgcaaattgggacgtattgggggacttcagaaaatcacgcaagtcgcaaattcgacaaacgcaaatcctgtagcaaaatgcaccgatgcgctcgcaaaatcagtcgcaatttgcggagacgattttggagtctgcaaattgcgagtgattttgcgaatgctattcgatgcacttaccatcgttttcatacattgtaatgcatatcactggattgatcgttatcgctaccgtgttttccgctaagccctggagttgcaatcctctccatagactatttgtcgccgcctaaacttgcctactctgtggttgcattttgcttgtgattttggcgctcacaatcccaacgcaaatctaggtgtaggtgaacgcaaaatcgctctcaaattgcgacgaaatgtgatttgcgcgattttctgaaggcccccattatctccgctcgtagtggacatccttataaaggagctgccaaccatgtagggctgactatgctagatagtcagccatagatagtaggaataggcggcgctgccgcagcaagctttcaagacagttctcattcttaccaagaagtctttgacttgtttcgcgggtcctcggataagaccctggttggactctttgagtcggaaacctttcctgtgcgctaccgcaaccccgctgcaaatttacggcaacatgctggcatgtgcagccttgtacaacagacgatggagagtgatcctgcagcaaaattcaagcaagacaacgcgctacaatatcgaaattctactatatatcgtttcatctacgttctcatatgtgattatcatgtttacgaggtatacttcgtacttagtatttatctgctggatacgnnnnnnnnnnnnnnnnnnnnnnnnnnnnnnnnnnnnnnnnnnnnnnnnnnnnnnnnnnnnnnnnnnnnnnnnnnnnnnnnnnnnnnnnnnnnnnnnnnnnnnnnnnncgattttctgaggcccccattatcttggacatccttataaaggagctgccaaccatgtagggctgactatgctagatagtcagccatagatagtaggaataggcggcgctgccgcagcaagctttcaagacagttctcattcttaccaagaagtctttgacttgtttcgcgggtcctcggataagaccctggttggactctttgagtcggaaacctttcctgtgcgctaccgcaaccccgctgcaaatttacggcaacatgctggcatgtgcagccttgtacaacagacgatggagagtgatcgtgcagcaaaattcaagcaagacaacgcgctacaatatcgaaattctactatatatcgtttcatctacgttctcatatgtgattatcatgtttacgaggtatacttcgtacttagtatttatctgctggatacgacaattgctataaggttttggtcggcatcatcggttgtagcaaacacgacgcaaattgggacgtattgggggacttcagaaaatcacgcaagtcgcaaattcgacaaacgcaaatcctgtagcaaaatgcaccgatgcgctcgcaaaatcagtcgcaatttgcggagacgattttggagtctgcaaattgcgagtgattttgcgaatgctattcgatgcacttaccatcgttttcatacattgtaatgcatatcactggattgatcgttatcgctactgtgttttccgctaagccctggagttgcaatcctctccatagactatttgtcgccgcctaaccttgcctactctgtggttgcattttgcttgtgattttggcgctcacaatcccaacgcaaatctaggtgtaggtgaacgcaaaatcgctctcaaattgcgacgaaatgtgatttgcgcgattttctgaaggcccccattatctccgctcgtagtggacatccttataaaggagctgccaaccatgtagggctgactatgctagatagtcagccatagatagtaggaataggcggcgctgccgcagcaagctttcaagacagttctcattcttaccaagaagtctttgacttgtttcgcgggtcctcggataagaccctggttggactctttgagtcggaaacctttcctgtgcgctaccgcaaccccgctgcaaatttacggcaacatgctggcatgtgcagccttgtacaacagacgatggagagcgatcgtgcagcaaaattcaagcaagacaacgcgctacaatatcgaaattnnnnnnnnnnnnnnnnnnnnnnnnnnnnnnnnnnnnnnnnnnnnnnnnnnnnnnnnnnnnnnnnnnnnnnnnnnnnnnnnnnnnnnnnnnnnnnnnnnnnnnnnnnnnnnnnnnnnnnnnnnnnnnnnnnnnnnnnnnnnnnnnnnnnnnnnnnnnnnnnnnnnnnnnnnnnnnnnnnnnnnnnnnnnnnnnnnnnnnnnnnnnnnnnnnnnnnnnnnnnnnnnnnnnnnnnnnnnnnnnnnnnnnnnnnnnnnnnnnnnnnnnnnnnnnnnnnnnnnnnnnnnnnnnnnnnnnnnnnnnnnnnnnnnnnnnnnnnnnnnnnnnnnnnnnnnnnnnnnnnnnnnnnnnnnnnnnnnnnnnnnnnnnnnnnnnnnnnnnnnnnnnnnnnnnnnnnnnnnnnnnnnnnnnnnnnnnnnnnnnnnnnnnnnnnnnnnnnnnnnnnnnnnnnnnnnnnnnnnnnnnnnnnnnnnnnnnnnnnnnnnnnnnnnnnnnnnnnnnnnnnnnnnnnnnnnnnnnnnnnnnnnnnnnnnnnnnnnnnnnnnnnnnnnnnnnnnnnnnnnnnnnnnnnnnnnnnnnnnnnnnnnnnnnnnnnnnnnnnnnnnnnnnnnnnnnnnnnnnnnnnnnnnnnnnnnnnnnnnnnnnnnnnnnnnnnnnnnnnnnnnnnnnnnnnnnnnnnnnnnnnnnnnnnnnnnnnnnnnnnnnnnnnnnnnnnnnnnnnnnnnnnnnnnnnnnnnnnnnnnnnnnnnnnnnnnnnnnnnnnnnnnnnnnnnnnnnnnnnnnnnnnnnnnnnnnnnnnnnnnnnnnnnnnnnnnnnnnnnnnnnnnnnnnnnnnnnnnnnnnnnnnnnnnnnnnnnnnnnnnnnnnnnnnnnnnnnnnnnnnnnnnnnnnnnnnnnnnnnnnnnnnnnnnnnnnnnnnnnnnnnnnnnnnnnnnnnnnnnnnnnnnnnnnnnnnnnnnnnnnnnnnnnnnnnnnnnnnnnnnnnnnnnnnnnnnnnnnnnnnnnnnnnnnnnnnnnnnnnnnnnnnnnnnnnnnnnnnnnnnnnnnnnnnnnnnnnnnnnnnnnnnnnnnnnnnnnnnnnnnnnnnnnnnnnnnnnnnnnnnnnnnnnnnnnnnnnnnnnnnnnnnnnnnnnnnnnnnnnnnnnnnnnnnnnnnnnnnnnnnnnnnnnnnnnnnnnnnnnnnnnnnnnnnnnnnnnnnnnnnnnnnnnnnnnnnnnnnnnnnnnnnnnnnnnnnnnnnnnnnnnnnnnnnnnnnnnnnnnnnnnnnnnnnnnnnnnnnnnnnnnnnnnnnnnnnnnnnnnnnnnnnnnnnnnnnnnnnnnnnnnnnnnnnnnnnnnnnnnnnnnnnnnnnnnnnnnnnnnnnnnnnnnnnnnnnnnnnnnnnnnnnnnnnnnnnnnnnnnnnnnnnnnnnnnnnnnnnnnnnnnnnnnnnnnnnnnnnnnnnnnnnnnnnnnnnnnnnnnnnnnnnnnnnnnnnnnnnnnnnnnnnnnnnnnnnnnnnnnnnnnnnnnnnnnnnnnnnnnnnnnnnnnnnnnnnnnnnnnnnnnnnnnnnnnnnnnnnnnnnnnnnnnnnnnnnnnnnnnnnnnnnnnnnnnnnnnnnnnnnnnnnnnnnnnnnnnnnnnnnnnnnnnnnnnnnnnnnnnnnnnnnnnnnnnnnnnnnnnnnnnnnnnnnnnnnnnnnnnnnnnnnnnnnnnnnnnnnnnnnnnnnnnnnnnnnnnnnnnnnnnnnnnnnnnnnnnnnnnnnnnnnnnnnnnnnnnnnnnnnnnnnnnnnnnnnnnnnnnnnnnnnnnnnnnnnnnnnnnnnnnnnnnnnnnnnnnnnnnnnnnnnnnnnnnnnnnnnnnnnnnnnnnnnnnnnnnnnnnnnnnnnnnnnnnnnnnnnnnnnnnnnnnnnnnnnnnnnnnnnnnnnnnnnnnnnnnnnnnnnnnnnnnnnnnnnnnnnnnnnnnnnnnnnnnnnnnnnnnnnnnnnnnnnnnnnnnnnnnnnnnnnnnnnnnnnnnnnnnnnnnnnnnnnnnnnnnnnnnnnnnnnnnnnnnnnnnnnnnnnnnnnnnnnnnnnnnnnnnnnnnnnnnnnnnnnnnnnnnnnnnnnnnnnnnnnnnnnnnnnnnnnnnnnnnnnnnnnnnnnnnnnnnnnnnnnnnnnnnnnnnnnnnnnnnnnnnnnnnnnnnnnnnnnnnnnnnnnnnnnnnnnnnnnnnnnnnnnnnnnnnnnnnnnnnnnnnnnnnnnnnnnnnnnnnnnnnnnnnnnnnnnnnnnnnnnnnnnnnnnnnnnnnnnnnnnnnnnnnnnnnnnnnnnnnnnnnnnnnnnnnnnnnnnnnnnnnnnnnnnnnnnnnnnnnnnnnnnnnnnnnnnnnnnnnnnnnnnnnnnnnnnnnnnnnnnnnnnnnnnnnnnnnnnnnnnnnnnnnnnnnnnnnnnnnnnnnnnnnnnnnnnnnnnnnnnnnnnnnnnnnnnnnnnnnnnnnnnnnnnnnnnnnnnnnnnnnnnnnnnnnnnnnnnnnnnnnnnnnnnnnnnnnnnnnnnnnnnnnnnnnnnnnnnnnnnnnnnnnnnnnnnnnnnnnnnnnnnnnnnnnnnnnnnnnnnnnnnnnnnnnnnnnnnnnnnnnnnnnnnnnnnnnnnnnnnnnnnnnnnnnnnnnnnnnnnnnnnnnnnnnnnnnnnnnnnnnnnnnnnnnnnnnnnnnnnnnnnnnnnnnnnnnnnnnnnnnnnnnnnnnnnnnnnnnnnnnnnnnnnnnnnnnnnnnnnnnnnnnnnnnnnnnnnnnnnnnnnnnnnnnnnnnnnnnnnnnnnnnnnnnnnnnnnnnnnnnnnnnnnnnnnnnnnnnnnnnnnnnnnnnnnnnnnnnnnnnnnnnnnnnnnnnnnnnnnnnnnnnnnnnnnnnnnnnnnnnnnnnnnnnnnnnnnnnnnnnnnnnnnnnnnnnnnnnnnnnnnnnnnnnnnnnnnnnnnnnnnnnnnnnnnnnnnnnnnnnnnnnnnnnnnnnnnnnnnnnnnnnnnnnnnnnnnnnnnnnnnnnnnnnnnnnnnnnnnnnnnnnnnnnnnnnnnnnnnnnnnnnnnnnnnnnnnnnnnnnnnnnnnnnnnnnnnnnnnnnnnnnnnnnnnnnnnnnnnnnnnnnnnnnnnnnnnnnnnnnnnnnnnnnnnnnnnnnnnnnnnnnnnnnnnnnnnnnnnnnnnnnnnnnnnnnnnnnnnnnnnnnnnnnnnnnnnnnnnnnnnnnnnnnnnnnnnnnnnnnnnnnnnnnnnnnnnnnnnnnnnnnnnnnnnnnnnnnnnnnnnnnnnnnnnnnnnnnnnnnnnnnnnnnnnnnnnnnnnnnnnnnnnnnnnnnnnnnnnnnnnnnnnnnnnnnnnnnnnnnnnnnnnnnnnnnnnnnnnnnnnnnnnnnnnnnnnnnnnnnnnnnnnnnnnnnnnnnnnnnnnnnnnnnnnnnnnnnnnnnnnnnnnnnnnnnnnnnnnnnnnnnnnnnnnnnnnnnnnnnnnnnnnnnnnnnnnnnnnnnnnnnnnnnnnnnnnnnnnnnnnnnnnnnnnnnnnnnnnnnnnnnnnnnnnnnnnnnnnnnnnnnnnnnnnnnnnnnnnnnnnnnnnnnnnnnnnnnnnnnnnnnnnnnnnnnnnnnnnnnnnnnnnnnnnnnnnnnnnnnnnnnnnnnnnnnnnnnnnnnnnnnnnnnnnnnnnnnnnnnnnnnnnnnnnnnnnnnnnnnnnnnnnnnnnnnnnnnnnnnnnnnnnnnnnnnnnnnnnnnnnnnnnnnnnnnnnnnnnnnnnnnnnnnnnnnnnnnnnnnnnnnnnnnnnnnnnnnnnnnnnnnnnnnnnnnnnnnnnnnnnnnnnnnnnnnnnnnnnnnnnnnnnnnnnnnnnnnnnnnnnnnnnnnnnnnnnnnnnnnnnnnnnnnnnnnnnnnnnnnnnnnnnnnnnnnnnnnnnnnnnnnnnnnnnnnnnnnnnnnnnnnnnnnnnnnnnnnnnnnnnnnnnnnnnnnnnnnnnnnnnnnnnnnnnnnnnnnnnnnnnnnnnnnnnnnnnnnnnnnnnnnnnnnnnnnnnnnnnnnnnnnnnnnnnnnnnnnnnnnnnnnnnnnnnnnnnnnnnnnnnnnnnnnnnnnnnnnnnnnnnnnnnnnnnnnnnnnnnnnnnnnnnnnnnnnnnnnnnnnnnnnnnnnnnnnnnnnnnnnnnnnnnnnnnnnnnnnnnnnnnnnnnnnnnnnnnnnnnnnnnnnnnnnnnnnnnnnnnnnnnnnnnnnnnnnnnnnnnnnnnnnnnnnnnnnnnnnnnnnnnnnnnnnnnnnnnnnnnnnnnnnnnnnnnnnnnnnnnnnnnnnnnnnnnnnnnnnnnnnnnnnnnnnnnnnnnnnnnnnnnnnnnnnnnnnnnnnnnnnnnnnnnnnnnnnnnnnnnnnnnnnnnnnnnnnnnnnnnnnnnnnnnnnnnnnnnnnnnnnnnnnnnnnnnnnnnnnnnnnnnnnnnnnnnnnnnnnnnnnnnnnnnnnnnnnnnnnnnnnnnnnnnnnnnnnnnnnnnnnnnnnnnnnnnnnnnnnnnnnnnnnnnnnnnnnnnnnnnnnnnnnnnnnnnnnnnnnnnnnnnnnnnnnnnnnnnnnnnnnnnnnnnnnnnnnnnnnnnnnnnnnnnnnnnnnnnnnnnnnnnnnnnnnnnnnnnnnnnnnnnnnnnnnnnnnnnnnnnnnnnnnnnnnnnnnnnnnnnnnnnnnnnnnnnnnnnnnnnnnnnnnnnnnnnnnnnnnnnnnnnnnnnnnnnnnnnnnnnnnnnnnnnnnnnnnnnnnnnnnnnnnnnnnnnnnnnnnnnnnnnnnnnnnnnnnnnnnnnnnnnnnnnnnnnnnnnnnnnnnnnnnnnnnnnnnnnnnnnnnnnnnnnnnnnnnnnnnnnnnnnnnnnnnnnnnnnnnnnnnnnnnnnnnnnnnnnnnnnnnnnnnnnnnnnnnnnnnnnnnnnnnnnnnnnnnnnnnnnnnnnnnnnnnnnnnnnnnnnnnnnnnnnnnnnnnnnnnnnnnnnnnnnnnnnnnnnnnnnnnnnnnnnnnnnnnnnnnnnnnnnnnnnnnnnnnnnnnnnnnnnnnnnnnnnnnnnnnnnnnnnnnnnnnnnnnnnnnnnnnnnnnnnnnnnnnnnnnnnnnnnnnnnnnnnnnnnnnnnnnnnnnnnnnnnnnnnnnnnnnnnnnnnnnnnnnnnnnnnnnnnnnnnnnnnnnnnnnnnnnnnnnnnnnnnnnnnnnnnnnnnnnnnnnnnnnnnnnnnnnnnnnnnnnnnnnnnnnnnnnnnnnnnnnnnnnnnnnnngagtgatcgtgcagcaaaattcaagcaagacaacgcgctacaatatcgaaattctactatatatcgtttcatctacgttctcataggtgattatcatgtttacgaggtatacttcgtacttagtatttatctgctggatacgacaattgctataaggttttggtcggcatcatcggttgtagcaaacacgacgcaaattgggacgtattgggggacttcagaaaatcacgcaaatcgcaaatttgacaaacgcaaatcctgtagcaaaatgcaccgatgcgctcgcaaaatcagtcgcaatttgcgaagacgattttggagtctgcaaattgcgagtgattttgcgaatgctattcgatgcacttaccatcgttttcatacattgtaatgcatatcactggattgatcgttatcgctactatgttttccactaagccctggagttgcaatcctctccatagactatttgtcgccgcctaaccttgcctactctgtggttgcattttgcttgtgattttggagctcacaatcccaacgcaaatctaggtgtaggtgaacgcaaaatcgctctcaaattgcgacgaaatgtgatttgcgtgattttctgaaggcccccattatctccgctcgtagtggacatccttataaaggagctgccaaccatgtaggactgactatgctagatagtcagccatagatagtaggaataggcggcgctgccgcagcaagctttcaagacagttctcattcttaccaagaagtctttgacttgtttcgcgggtcctcggataagaccctggttggactctttgagtcggaaacttttcctgtgcgctaccgcaaccccgctgcaaatttacggcaacatgctggcatgtgcagccttgtacaacagacgatggagagtgatcgtgcagcaaaattcaagcaagacaacgcgctacaatatcgaaattctactatatatcgtttcatctacgttctcataggtgattatcatgtttacgaggtatacttcgtacttagtatttatctgctggatacgacaattgctataaggttttggtcggcatcatcggttgtagcaaacacgacgcaaattgggacgtattgggggacatcagaaaatcacgcaaatcgcaaatttgacaaacgcaaatcctgtagcaaaatgcgccgatgcgctcgcaaaatcagtcgcaatttgcggagacgattttggagtctgcaaattgcgagtgattttgcgaatgctattcgatgcacttaccatcgttttcatacattgtaatgcatatcactggattgatcgttatcgctactgtgttttccgctaagccctggagttgcaatcctctccatagactatttgtcgccgcctaaccttgcctactctgtggttgcattttgcttgtgattttggcgctcacaatcccaacgcaaatctaggtgtaggtgaacgcaaaatcgctctcaaattgcgacgaaatgtgatttgcgtgattttctgaaggtccccattatctccgctcgtagtggacatccttataaaggagctgccaaccatgtagggctgactatgctagatagtcagccatagatagtaggaataggcggcgctgccgcagcaagctttcaagacagttctcattcttaccaagaagtctttgacttgtttcgcgggtcctcggataagaccctggttggactctttgagtcggaaacctttcctgtgcgctaccgcaaccccgctgcaaatttacggcaacatgctggcatgtgcagccttgtacaacagacgatggagagtgatcgtgcagcaaaattcaagcaagacaacgcgctacaatatcgaaattctactatatatcgtttcatctacgttctcatatgtgattatcatgtttacgaggtatacttcgtacttagtatttatctgctggatacgacaattgctataaggttttggtcggcatcatcggttgtagcaaacacgacgcaaattgggacgtattgggggacttcagaaaatcacgcaaatcgcaaatttgacaaacgcaaatcctgtagcaaaatgcgccgatgcgctcgcaaaatcagtcgcaatttgcggagacgattttggagtctgcaaattgcgagtgattttgcgaatgctattcgatgcacttaccatcgttttcatacattgtaatgcatatcactggattgatcgttatcgctactgtgttttccgctaagccctggagttgcaatcctctccatagactatttgtcgccgcctaaccttgcctactctgtggttgcattttgcttgtgattttggagctcacaatcccaacgcaaatctaggtgtaggtgaacgcaaaatcgctctcaaattgcgacgaaatgtgatttgcgtgattttctgaaggcccccattatctccgctcgtagtggacatccttataaaggagctgccaaccatgtagggctgactatgctagatagtcagccatagatagtaggaataggcggcgctgccgcagcaagctttcaagacagttctcattcttaccaagaagtctttgacttgtttcgcgggtcctcggataagaccctggttggactctttgagtcggaaacttttcctgtgcgctaccgcaaccccgctgcaaatttacggcaacatgctggcatgtgcagccttgtacaacagacgatggagagtgatcgtgcagcaaaattcaagcaagacaacgcgctacaatatcgaaattctactatatatcgtttcatctacgttctcatatgtgattatcatgtttacgaggtatacttcgtacttagtatttatctgctggatacgacaattgctataaggttttggtcggcatcatcggttgtagcaaacacgacgcaaattgggacgtattgggggacttcagaaaatcacgcaagtcgcaaattcgacaaacgcaaatcctgtagcaaaatgcaccgatgcgctcgcaaaatcagtcgcaatttgcggagacgattttggagtctgcaaattgcgagtgattttgcgaatgctattcgatgcacttaccatcgttttcatacattgtaatgcatatcactggattgatcgttatcgctactgtgttttccgctaagccctggagttgcaatcctctccatagactatttgtcgccgcctaaacttgcctactctgtggttgcattttgcttgtgattttggcgctcacaatcccaacgcaaatctaggtgtaggtgaacgcaaaatcgctctcaaattgcgacgaaatgtgatttgcgcgattttctgaaggcccccattatctccgctcgtagtggacatccttataaaggagctgccaaccatgtagggctgactatgctagatagtcagccatagatagtaggaataggcggcgctgccgcagcaagctttcaagacagttctcattcttaccaagaagtctttgacttgtttcgcgggtcctcggataagaccctggttggactctttgagtcggaaacctttcctgtgcgctaccgcaaccccgctgcaaatttacggcaacatgctggcatgtgcagccttgtacaacagacgatggagagtgatcgtgcagcaaaattcaagcaagacaacgcgctacaatatcgaaattctactatatatcgtttcatctacgttctcatatgtgattatcatgtttacgaggtatacttcgtacttagtatttatctgctggatacgacaattgctataaggttttggtcggcatcatcggttgtagcaaacacgacgcaaattgggacgtattgggggacttcagaaaatcacgcaagtcgcaaattcgacaaacgcaaatcctgtagcaaaatgcaccgatgcgctcgcaaaatcagtcgcaatttgcggagacgattttggagtctgcaaattgcgagtgattttgcgaatgctattcgatgcacttaccatcgttttcatacattgtaatgcatatcactggattgatcgttatcgctactgtgttttccgctaagccctggagttgcaatcctctccatagactatttgtcgccgcctaaacttgcctactctgtggttgcattttgcttgtgattttggcgctcacaatcccaacgcaaatctaggtgtaggtgaacgcaaaatcgctctcaaattgcgacgaaatgtgatttgcgcgattttctgaaggcccccattatctccgctcgtagtggacatccttataaaggagctgccaaccatgtagggctgactatgctagatagtcagccatagatagtaggaataggcggcgctgccgcagcaagctttcaagacagttctcattcttaccaagaagtctttgacttgtttcgcgggtcctcggataagaccctggttggactctttgagtcggaaacctttcctgtgcgctaccgcaaccccgctgcaaatttacggcaacatgctggcatgtgcagccttgtacaacagacgatggagagtgatcgtgcagcaaaattcaagcaagacaacgcgctacaatatcgaaattctactatatatcgtttcatctacgttctcatatgtgattatcatgtttacgaggtatacttcgtacttagtatttatctgctggatacgccaattgctataaggttttggtcggcatcatcggttgtagcaaacacgacgnnnnnnnnnnnnnnnnnnnnnnnnnnnnnnnnnnnnnnnnnnnnnnnnnnnnnnnnnnnnnnnnnnnnnnnnnnnnnnnnnnnnnnnnnnnnnnnnnnnnnnnnnnnnnnnnnnnnnnnnnnnnnnnnnnnnnnnnnnnnnnnnnnnnnnnnnnnnnnnnnnnnnnnnnnnnnnnnnnnnnnnnnnnnnnnnnnnnnnnnnnnnnnnnnnnnnnnnnnnnnnnnnnnnnnnnnnnnnnnnnnnnnnnnnnnnnnnnnnnnnnnnnnnnnnnnnnnnnnnnnnnnnnnnnnnnnnnnnnnnnnnnnnnnnnnnnnnnnnnnnnnnnnnnnnnnnnnnnnnnnnnnnnnnnnnnnnnnnnnnnnnnnnnnnnnnnnnnnnnnnnnnnnnnnnnnnnnnnnnnnnnnnnnnnnnnnnnnnnnnnnnnnnnnnnnnnnnnnnnnnnnnnnnnnnnnnnnnnnnnnnnnnnnnnnnnnnnnnnnnnnnnnnnnnnnnnnnnnnnnnnnnnnnnnnnnnnnnnnnnnnnnnnnnnnnnnnnnnnnnnnnnnnnnnnnnnnnnnnnnnnnnnnnnnnnnnnnnnnnnnnnnnnnnnnnnnnnnnnnnnnnnnnnnnnnnnnnnnnnnnnnnnnnnnnnnnnnnnnnnnnnnnnnnnnnnnnnnnnnnnnnnnnnnnnnnnnnnnnnnnnnnnnnnnnnnnnnnnnnnnnnnnnnnnnnnnnnnnnnnnnnnnnnnnnnnnnnnnnnnnnnnnnnnnnnnnnnnnnnnnnnnnnnnnnnnnnnnnnnnnnnnnnnnnnnnnnnnnnnnnnnnnnnnnnnnnnnnnnnnnnnnnnnnnnnnnnnnnnnnnnnnnnnnnnnnnnnnnnnnnnnnnnnnnnnnnnnnnnnnnnnnnnnnnnnnnnnnnnnnnnnnnnnnnnnnnnnnnnnnnnnnnnnnnnnnnnnnnnnnnnnnnnnnnnnnnnnnnnnnnnnnnnnnnnnnnnnnnnnnnnnnnnnnnnnnnnnnnnnnnnnnnnnnnnnnnnnnnnnnnnnnnnnnnnnnnnnnnnncaacacgacgcaaattgggacgtattgggggacttcagaaaatcacgcaaatcgcaaatttgacaaacgcaaatcctgtagcaaaatgcgccgatgcgctcgcaaaatcagtcgcaatttgcggagacgattttggagtctgcaaattgcgagtgattttgcgaatgctattcgatgcacttaccatcgttttcatacattgtaatgcatatcactggattgatcgttatcgctactgtgttttccgctaagccctggagttgcaatcctctccatagactatttgtcgccgcctaaccttgcctactctgtggttgcattttgcttgtgatcttggagctcacaatcccaacgcaaatctaggtgtaggtgaacgcaaaatcgctctcaaattgcgacgaaatgtgatttgcgtgattttctgaaggcccccattatctccgctcgtagtggacatccttataaaggagctgccaaccatgtagggctgactatgctagatagtcagccatagatagtaggaataggcggcgctgccgcagcaagctttcaagacagttctcattcttaccaagaagtctttgacttgtttcgcgggtcctcggataagaccctggttggactctttgagtcggaaacttttcctgtgcgctaccgcaaccccgctgcaaatttacggcaacatgctggcatgtgcagccttgtacaacagacgatggagagtgatcgtgcagcaaaattcaagcaagacaacgcgctacaatatcgaaattctactatatatcgtttcatctacgttctcatatgtgattatcatgtttacgaggtatacttcgtacttagtatttatctgctggatacgacaattgctataaggttttggtcggcatcatcggttgtagcaaacacgacgcaaattgggacgtattgggggacttcagaaaatcacgcaaatcgcaaatttgacaaacgcaaatcctgtagcaaaatgcaccgatgcgctcgcaaaatcagtcgcaatttgcgaagacgattttggagtctgcaaattgcgagtgattttgcgaatgctattcgatgcacttaccatcgttttcatacattgtaatgcatatcactggattgatcgttatcgctactatgttttccactaagccctggagttgcaatcctctccatagactatttgtcgccgcctaaccttgcctactctgtggttgcattttgcttgtgattttggagctcacaatcccaacgcaaatctaggtgtaggtgaacgcaaaatcgctctcaaattgcgacgaaatgtgatttgcgtgattttctgaaggtccccattatctccgctcgtagtggacatccttataaaggagctgccaaccatgtagggctgactatgctagatagtcagccatagatagtaggaataggcggcgctgccgcagcaagctttcaagacagttctcattcttaccaagaagtctttgacttgtttcgcgggtcctcggataagaccctggttggactctttgagtcggaaacctttcctgtgcgctaccgcaaccccgctgcaaatttacggcaacatgctggcatgtgcagccttgtacaacagacgatggagagtgatcgtgcagcaaaattcaagcaagacaacgcgctacaatatcgaaattctactatatatcgtttcatctacgttctcatatgtgattatcatgtttacgaggtatacttcgtacttagtatttatctgctggatacgacaattgctataaggttttggtcggcatcatcggttgtagcaaacacgacgcaaattgggacgtattgggggacttcagaaaatcacgcaagtcgcaaattcgacaaacgcaaatcctgtagcaaaatgcaccgatgcgctcacaaaatcagtcgcaatttgcggagacgattttggagtctgcaaattgcgagtgattttgcgaatgctattcgatgcacttaccatcgttttcatacattgtaatgcatatcactggattgatcgttatcgctactgtgttttccgctaagccctggagttgcaatcctctccatagactatttgtcgccgcctaaacttgcctactctgtggttgcattttgcttgtgattttggcgctcacaatcccaacgcaaatctaggtgtaggtgaacgcaaaatcgctctcaaattgcgacgaaatgtgatttgcgcgattttctgaaggcccccattatctccgctcgtagtggacatccttataaaggagctgccaaccatgtagggctgactatgctagatagtcagccatagatagtaggaataggcggcgctgccgcagcaagctttcaagacagttctcattcttaccaagaagtctttgacttgtttcgcgggtcctcggataagaccctggttggactctttgagtcggaaacctttcctgtgcgctaccgcaaccccgctgcaaatttacggcaacatgctggcatgtgcagccttgtacaacagacgatggagagtgatcgtgcagcaaaattcaagcaagacaacgcgctacaatatcgaaattctactatatatcgtttcatgtacgttctcatatgtgattatcatgtttacgaggtatacttcgtacttagtatttatctgctggatacgacaattgctataaggttttggtcggcatcatcggttgtagcaaacacgacgcaaattgggacgtattgggggacttcagaaaatcacgcaagtcgcaaattcgacaaacgcaaatcctgtagcaaaatgcaccgatgcgctcgcaaaatcagtcgcaatttgcggagacgattttggagtctgcaaattgcgagtgattttgcgaatgctattcgatgcacttaccatcgttttcatacattgtaatgcatatcactggattgatcgttatcgctactgtgttttccgctaagccctggagttgcaatcctctccatagactatttgtcgccgcctaaacttgcctactctgtggttgcattttgcttgtgattttggcgctcacaatcccaacgcaaatctaggtgtaggtgaacgcaaaatcgctctcaaattgcgacgaaatgtgatttgcgcgattttctgaaggcccccattatctccgctcgtagtggacatccttataaaggagctgccaaccatgtagggctgactatgctagatagtcagccatagatagtaggaataggcggcgctgccgcagcaagctttcaagacagttctcattcttaccaagaagtctttgacttgtttcgcgggtcctcggataagaccctggttggactctttgagtcggaaacctttcctgtgcgctaccgcaaccccgctgcaaatttacggcaacatgctggcatgtgcagccttgtacaacagacgatggagagtgatcgtgcagcaaaattcaagcaagacaacgcgctacaatatcgaaattgtactgtatatcgtttcatctacgttctcatatgtgattatcatgtttacgaggtatacttcgtacttagtatttatctgctggatacgacaattgctataaggttttggtcggcatcatcggttgtagcaaacacgacgcaaattgggacgtattgggggacttcagaaaatcacgcaagtcgcaaattcgacaaacgcaaatcctgtagcaaaatgcaccgatgcgctcgcaaaatcagtcgcaatttgcggagacgattttggagtctgcaaattgcgagtgattttgcgaatgctattcgatgcacttaccatcgttttcatacattgtaatgcatatcactggattgatcgttatcgctactgtgttttccgctaagccctggagttgcaatcctctccatagactatttgtcgccgcctaaacttgcctactctgtggttgcattttgcttgtgattttggcgctcacaatcccaacgcaaatctaggtgtaggtgaacgcaaaatcgctctcaaattgcgacgaaatgtgatttgcgcgattttctgaaggcccccattatctccgctcgtagtggacatccttataaaggagctgccaaccatgtagggctgactatgctagatagtcagccatagatagtaggaataggcggcgctgccgcagcaagctttcaagacagttctcattcttaccatgaagtctttgacttgtttcgcgggtcctcggataagaccctggttggactctttgagtcggaaacctttcctgtgcgctaccgcaaccccgctgcaaatttacggcaacatgctggcatgtgcagccttgtacaacagacgatggagagtgatcgtgcagcaaaattcaagcaagacaacgcgctacaatatcgaaattctactatatatcgtttcatctacgttctcatatgtgattatcatgtttacgaggtatacttcgtacttagtatttatctgctggatacgacaattgctataaggttttggtcggcatcatcggttgtagcaaacacgacgcaaattgggacgtattgggggacttcagaaaatcacgcaagtcgcaaattcgacaaacgcaaatcctgtagcaaaatgcaccgatgcgctcgcaaaatcagtcgcaatttgcggagacgattttggagtctgcaaattgcgagtgattttgcgaatgctattcgatgcacttaccatcgttttcatacattgtaatgcatatcactggattgatcgttatcgctactgtgttttccgctaagccctggagttgcaatcctctccatagactatttgtcgccgcctaaacttgcctactctgtggttgcattttgtttgtgattttggcgctcacaatcccaacgcaaatctaggtgtaggtgaacgcaaaatcgctctcaaattgcgacgaaatgtgatttgcgcgattttctgaaggcccccattatctccgctcgtagtggacatccttataaaggagctgccaaccatgtagggctgactatgctagatagtcagccatagatagtaggaataggcggcgctgccgcagcaagctttcaagacagttctcattcttaccaagaagtctttgacttgtttcgcgggtcctcggataagaccctggttggactctttgagtcggaaacctttcctgtgtgctaccgcaaccccgctgcaaatttacggcaacatgctggcatgtgcagccttgtacaacagacgatggagagtgatcgtgcagcaaaattcaagcaagacaacgcgctacaatatcgaaattctactgtatatcgtttcatctacgttctcatatgtgattatcatgtttacgaggtatacttcgtacttagtatttatctgctggatacgacaattgctataaggttttggtcggcatcatcggttgtagcaaacacgacgcaaattgggacgtattgggggacttcagaaaatcacgcaaatcgcaaatttgacaaacgcaaatcctgtagcaaaatgcaccgatgcgctcgcaaaatcagtcgcaatttgcgaagacgattttggagtctgcaaattgcgagtgattttgcgaatgctattcgatgcacttaccatcgttttcatacattgtaatgcatatcactggattgatcgttatcgctactatgttttccactaagccctggagttgcaatcctctccatagactatttgtcgccgcctaaccttgcctactctgtggttgcattttgcttgtgattttggagctcacaatcccaacgcaaatctaggtgtaggtgaacgcaaaatcgctctcaaattgcgacgaaatgtgatttgcgtgattttctgaaggcccccattatctccgctcgtagtggacatccttataaaggagctgccaaccatgtaggactgactatgctagatagtcagccatagatagtaggaataggcggcgctgccgcagcaagctttcaagacagttctcattcttaccaagaagtctttgacttgtttcgcgggtcctcggataagaccctggttggactctttgagtcggaaacttttcctgtgcgctaccgcaaccccgctgcaaatttacggcaacatgctggcatgtgcagccttgtacaacagacgatggagagtgatcgtgcagcaaaattcaagcaagacaacgcgctacaatatcgaaattctactatatatcgtttcatctacgttctcatatgtgattatcatgtttacgaggtatacttcgtacttagtatttatctgctggatacgacaattgctataaggttttggtcggcatcatcggttgtagcaaacacgacgcaaattgggacgtattgggggacatcagaaaatcacgcaaatcgcaaatttgacaaacgcaaatcctgtagcaaaatgcgccgatgcgctcgcaaaatcagtcgcaatttgcggagacgattttggagtctgcaaattgcgagtgattttgcgaatgctattcgatgcacttaccatcgtgttcatacattgtaatgcatatcactggattgatcgttatcgctactgtgttttccgctaagccctggagttgcaatcctctccatagactatttgtcgccgcctaaccttgcctactctgtggttgcattttgcttgtgatcttggcgctcacaatcccaacgcaaatctaggtgtaggtgaacgcaaaatcgctctcaaattgcgacgaaatgtgatttgcgtgattttctgaaggtccccattatctccgctcgtagtggacatccttataaaggagctgccaaccatgtagggctgactatgctagatagtcagccatagatagtaggaataggcggcgctgccgcagcaagctttcaagacagttctcattcttaccaagaagtctttgacttgtttcgcgggtcctcggataagaccctggttggactctttgagtcggaaacttttcctgtgcgctaccgcaaccccgctgcaaatttacggcaacatgctggcatgtgcagccttgtacaacagacgatggagagtgatcgtgcagcaaaattcaagcaagacaacgcgctacaatatcgaaattctactatatatcgtttcatctacgttctcatatgtgattatcatgtttacgaggtatacttcgtacttagtatttatctgctggatacgacaattgctataaggttttggtcggcatcatcggttgtagcaaacacgacgcaaattgggacgtattgggggacttcagaaaatcacgcaaatcgcaaatttgacaaacgcaaatcctgtagcaaaatgcaccgatgcgctcgcaaaatcagtcgcaatttgcgaagacgattttggagtctgcaaattgcgagtgattttgcgaatgctattcgatgcacttaccatcgttttcatacattgtaatgcatatcactggattgatcgttatcgctactatgttttccactaagccctggagttgcaatcctctccatagactatttgtcgccgcctaaccttgcctactctgtggttgcattttgcttgtgattttggagctcacaatcccaacgcaaatctaggtgtaggtgaacgcaaaatcgctctcaaattgcgacgaaatgtgatttgcgtgattttctgaaggtccccattatctccgctcgtagtggacatccttataaaggagctgccaaccatgtagggctgactatgctagatagtcagccatagatagtaggaataggcggcgctgccgcagcaagctttcaagacagttctcattcttaccaagaagtctttgacttgtttcgcgggtcctcggataagaccctggttggactctttgagtcggaaacctttcctgtgcgctaccgcaaccccgctgcaaatttacggcaacatgctggcatgtgcagccttgtacaacagacgatggagagtgatcgtgcagcaaaattcaagcaagacaacgcgctacaatatcgaaattgtactatatatcgtttcatctacgttctcatatgtgattatcatgtttacgaggtatacttcgtacttagtatttatctgctggatacgacaattgctataaggttttggtcggcatcatcggttgtagcaaacacgacgcaaattgggacgtattgggggacttcagaaaatcacgcaagtcgcaaattcgacaaacgcaaatcctgtagcaaaatgcgccgatgcgctcgcaaaatcagtcgcaatttgcggagacgattttggagtctgcaaattgcgagtgattttgcgaatgctattcgatgcacttaccatcgttttcatacattgtaatgcatatcactggattgatcgttatcgctactgtgttttccgctaagccctggagttgcaatcctctccatagactatttgtcgccgcctaaccttgcctactctgtggttgcattttgcttgtgattttggcgctcacaatcccaacgcaaatctaggtgtaggtgaacgcaaaatcgctctcaaattgcgacgaaatgtgatttgcgcgattttctgaaggcccccattatctccgctcgtagtggacatccttataaaggagctgccaaccatgtagggctgactatgctagatagtcagccatagatagtaggaataggcggcgctgccgcagcaagctttcaagacagttctcattcttaccaagaagtctttgacttgtttcgcgggtcctcggataagaccctggttggactctttgagtcggaaacctttcctgtgcgctaccgcaaccccgctgcaaatttacggcaacatgctggcatgtgcagccttgtacaacagacgatggagagtgatcgtgcagcaaaattcaagcaagacaacgcgctacaatatcgaaattctactatatatcgtttcatctacgttctcatatgtgattatcatgtttacgaggtatacttcgtacttagtatttatctgctggatacgacaattgctataaggttttggtcggcatcatcggttgtagcaaacacgacgcaaattgggacgtattgggggacttcagaaaatcacgcaagtcgcaaattcgacaaacgcaaatcctgtagcaaaatgcaccgatgcgctcgcaaaatcagtcgcaatttgcggagacgattttggagtctgcaaattgcgagtgattttgcgaatgctattcgatgcacttaccatcgttttcatacattgtaatgcatatcactggattgatcgttatcgctactgtgttttccgctaagccctggagttgcaatcctctccatagactatttgtcgccgcctaaccttgcctactctgtggttgcattttgcttgtgattttggcgctcacaatcccaacgcaaatctaggtgtaggtgaacgcaaaatcgctctcaaattgcgacgaaatgtgatttgcgtgattttctgaaggcccccattatctccgctcgtagtggacatccttataaaggagctgccaaccatgtagggctgactatgctagatagtcagccatagatagtaggaataggcggcgctgccgcagcaagctttcaagacagttctcattcttaccaagaagtctttgacttgtttcgcgggtcctcggataagaccctggttggactctttgagtcggaaacctttcctgtgcgctaccgcaaccccgctgcaaatttacggcaacatgctggcatgtgcagccttgtacaacagacgatggagagcgatcgtgcagcaaaattcaagcaagacaacgcgctacaatatcgaaattctactatatatcgtttcatctacgttctcatatgtgattatcatgtttacgaggtatacttcgtacttagtatttatctgctggatacgacaattgctataaggttttggtcggcatcatcggttgtagcaaacacgacgcaaattgggacgtattgggggacttcagaaaatcacgcaagtcgcaaatttgacaaacgcaaatcctgtagcaaaatgcgccgatgcgctcgcaaaatcagtcgcaatttgcggagacgattttggagtctgcaaattgcgagtgattttgcgaatgctattcgatgcacttaccatcgttttcatacattgtaatgcatatcactggattgatcgttatcgctactgtgttttccgctaagccctggagttgcaatcctctccatagactatttgtcgccgcctaaacttgcctactctgtggttgcattttgcttgtgattttggcgctcacaatcccaacgcaaatctaggtgtaggtgaacgcaaaatcgctctcaaattgcgacgaaatgtgatttgcgcgattttctgaaggcccccattatctccgctcgtagtggacatccttataaaggagctgccaaccatgtagggctgactatgctagatagtcagccatagatagtaggaataggcggcgctgccgcagcaagctttcaagacagttctcattcttaccaagaagtctttgacttgtttcgcgggtcctcggataagaccctggttggactctttgagtcggaaacctttcctgtgcgctaccgcaaccccgctgcaaatgtacggcaacatgctggcatgtgcagccttgtacaacagacgatggagagtgatcgtgcagcaaaattcaagcaagacaacgcgctacaatatcgaaattctactgtatatcgtttcatctacgttctcatatgtgattatcatgtttacgaggtatacttcgtacttagtatttatctgctggatacgacaattgctataaggttttggtcggcatcatcggttgtagcaaacacgacgcaaattgggacgtattgggggacttcagaaaatcacgcaagtcgcaaattcgacaaacgcaaatcctgtagcaaaatgcaccgatgcgctcgcaaaatcagtcgcaatttgcggagacgattttggagtctgcaaattgcgagtgattttgcgaatgctattcgatgcacttaccatcgttttcatacattgtaatgcatatcactggattgatcgttatcgctactgtgttttccgctaagccctggagttgcaatcctctccatagactatttgtcgccgcctaaccttgcctactctgtggttgcattttgcttgtgattttggcgctcacaatcccaacgcaaatctaggtgtaggtgaacgcaaaatcgctctcaaattgcgacgaaatgtgatttgcgcgattttctgaaggcccccattatctccgctcgtagtggacatccttataaaggagctgccaaccatgtagggctgactatgctagatagtcagccatagatagtaggaataggcggcgctgccgcagcaagctttcaagacagttctcattcttaccaagaagtctttgacttgtttcgcgggtcctcggataagaccctggttggactctttgagtcggaaacctttcctgtgcgctaccgcaaccccgctgcaaatttacggcaacatgctggcatgtgcagccttgtacaacagacgatggagagtgatcgtgcagcaaaattcaagcaagacaacgcgctacaatatcgaaattctactatatatcgtttcatctacgttctcatatgtgattatcatgtttacgaggtatacttcgtacttagtatttatctgctggatacgacaattgctataaggttttggtcggcatcatcggttgtagcaaacacgacgcaaattgggacgtattgggggacttcagaaaatcacgcaagtcgcaaattcgacaaacgcaaatcctgtagcaaaatgcaccgatgcgctcgcaaaatcagtcgcaatttgcggagacgattttggagtctgcaaattgcgagtgattttgcgaatgctattcgatgcacttaccatcgttttcatacattgtaatgcatatcactggattgatcgttatcgctactgtgttttccgctaagccctggagttgcaatcctctccatagactatttgtcgccgcctaaacttgcctactctgtggttgcattttgcttgtgattttggcgctcacaatcccaacgcaaatctaggtgtaggtgaacgcaaaatcgctctcaaattgcgacgaaatgtgatttgcgcgattttctgaaggcccccattatctccgctcgtagtggacatccttataaaggagctgccaaccatgtagggctgactatgctagatagtcagccatagatagtaggaataggcggcgctgccgcagcaagctttcaagacagttctcattcttaccaagaagtctttgacttgtttcgcgggtcctcggataagaccctggttggactctttgagtcggaaacctttcctgtgcgctaccgcaaccccgctgcaaatttacggcaacatgctggcatgtgcagccttgtacaacagacgatggagagtgatcgtgcagcaaaattcaagcaagacaacgcgctacaatatcgaaattctactgtatatcgtttcatctacgttctcatatgtgattatcatgtttacgaggtatacttcgtacttagtatttatctgctggatacgacaattgctataaggttttggtcggcatcatcggttgtagcaaacacgacgcaaattgggacgtattgggggacttcagaaaatcatgcaagtcgcaaattcgacaaacgcaaatcctgtagcaaaatgcaccgatgcgctcgcaaaatcagtcgcaatttgcggagacgattttggagtctgcaaattgcgagtgattttgcgaatgctattcgatgcacttaccatcgttttcatacattgtaatgcatatcactggattgatcgttatcgctactgtgttttccgctaagccctggagttgcaatcctctccatagactatttgtcgccgcctaaacttgcctactctgtggttgcattttgcttgtgattttggcgctcacaatcccaacgcaaatctaggtgtaggtgaacgcaaaatcgctctcaaattgcgacgaaatgtgatttgcgcgattttctgaaggcccccattatctccgctcgtagtggacatccttataaaggagctgccaaccatgtagggctgactatgctagatagtcagccatagatagtaggaataggcggcgctgccgcagcaagctttcaagacagttctcattcttaccaagaagtctttgacttgtttcgcgggtcctcggataagaccctggttggactctttgagtcggaaacctttcctgtgcgctaccgcaaccccgctgcaaatttacggcaacatgctggcatgtgcagccttgtacaacagacgatggagagtgatcgtgcagcaaaattcaagcaagacaacgcgctacaatatcgaaattctactgtatatcgtttcatctacgttctcatatgtgattatcatgtttacgaggtatacttcgtacttagtatttatctgctggatacgacaattgctataaggttttggtcggcatcatcggttgtagcaaacacgacgcaaattgggacgtattgggggacttcagaaaatcacgcaagtcgcaaattcgacaaacgcaaatcctgtagcaaaatgcaccgatgcgctcgcaaaatcagtcgcaatttgcggagacgattttggagtctgcaaattgcgagtgattttgcgaatgctattcgatgcacttaccatcgttttcatacattgtaatgcatatcactggattgatcgttatcgctactgtgttttccgctaagccctggagttgcaatcctctccatagactatttgtcgccgcctaaacttgcctactctgtggttgcattttgcttgtgattttggcgctcacaatcccaacgcaaatctaggtgtaggtgaacgcaaaatcgctctcaaattgcgacgaaatgtgatttgcgcgattttctgaaggcccccattatctccgctcgtagtggacatccttataaaggagctgccaaccatgtaggactgactatgctagatagtcagccatagatagtaggaataggcggcgctgccgcagcaagctttcaagacagttctcattcttaccaagaagtctttgacttgtttcgcgggtcctcggataagaccctggttggactctttgagtcggaaacttttcctgtgcgctaccgcaaccccgctgcaaatttacggcaacatgctggcatgtgcagccttgtacaacagacgatggagagtgatcgtgcagcaaaattcaagcaagacaacgcgctacaatatcgaaattctactgtatatcgtttcatctacgttctcatatgtgattatcatgtttacgaggtatacttcgtacttagtatttatctgctggatacgacaattgctataaggttttggtcggcatcatcggttgtagcaaacacgacgcaaattgggacgtattgggggacttcagaaaatcacgcaagtcgcaaattcgacaaacgcaaatcctgtagcaaaatgcaccgatgcgctcacaaaatcagtcgcaatttgcggagacgattttggagtctgcaaattgcgagtgattttgcgaatgctattcgatgcacttaccatcgttttcatacattgtaatgcatatcactggattgatcgttatcgctactgtgttttccgctaagccctggagttgcaatcctctccatagactatttgtcgccgcctaaacttgcctactctgtggttgcattttgcttgtgattttggcgctcacaatcccaacgcaaatctaggtgtaggtgaacgcaaaatcgctctcaaattgcgacgaaatgtgatttgcgcgattttctgaaggcccccattatctccgctcgtagtggacatccttataaaggagctgccaaccatgtagggctgactatgctagatagtcagccatagatagtaggaataggcggcgctgccgcagcaagctttcaagacagttctcattcttaccatgaagtctttgacttgtttcgcgggtcctcggataagaccctggttggactctttgagtcggaaacctttcctgtgcgctaccgcaaccccgctgcaaatttacggcaacatgctggcatgtgcagccttgtacaacagacgatggagagtgatcgtgcagcaaaattcaagcaagacaacgcgctacaatatcgaaattgtactgtatatcgtttcatctacgttctcatatgtgattatcatgtttacgaggtatacttcgtacttagtatttatctgctggatacgacaattgctataaggttttggtcggcatcatcggttgtagcaaacacgacgcaaattgggacgtattgggggacttcagaaaatcacgcaagtcgcaaattcgacaaacgcaaatcctgtagcaaaatgcaccgatgcgctcgcaaaatcagtcgcaatttgcggagacgattttggagtctgcaaattgcgagtgattttgcgaatgctattcgatgcacttaccatcgttttcatacattgtaatgcatatcactggattgatcgttatcgctactgtgttttccgctaagccctggagttgcaatcctctccatagactatttgtcgccgcctaaacttgcctactctgtggttgcattttgcttgtgattttggcgctcacaatcccaacgcaaatctaggtgtaggtgaacgcaaaatctcgcaaatcacatttgtgcctgcatctgcgagatggctacaccatgaggtgtcttataaatgacacaaaattatcgatatttgtcagaacttacaaatacagtatcatgcttggctctggtgttcttgcagttcgcattactccgatggacgtgaaggctgtcgttgcggcaaaagcttccgcacatcaacaacggcgcagacgagcgctgcgcctgcttctactaagaggcactaccaaggagagagactaccttaccgtagcgagtctgcaggacccgctccaatccgcgtggcagcaactctacgacgaaaagcttcctggtagcttcatagctgccgtatccctaccacccacagcgttcgagttactcctagcgaagtttgccaagttctaccagctcaagtggaggcccggtcagcgcggacgcccgccaaaactgcgtttcttgcatgcagtactaggttgtgtgctgcacttctacacggcagctgtagaacagaagacactgtgtgaaatattcggtagtccgccagctactttgtcaagtgtgttggcaagggctgaaatagcgctggagctagcgcttaatgagcttcccgatgctgctgttcgctatcctaccaagcagacgcaagtcgcgtgggcggcagcagttaaagcgcgcgagcctttggtagagggtgtatggggatttgttgatggaaagaactatcgagttcaggagccatcgggcgtcgacttgcaaaacgcgcactacaacggtatgaatcacgttggtatagatatttattttctatcgactaacatgtatgcatgcgttatgattttaggttggctacattcggtacttgtgactggcacactttgctatggctgtgatgggactctcgtgtgggcaaagcataactaccccggttcatggaacgacggggagattagctttgccctgcaagagaaacttgccgatcccgatatgactgttcaagggaccggtgttgctgctgatacagcgtttccagtgtccaaggggatgcgcgggcgtattattacgccgatcaaggatggtgatctagaacgtgcccccgcaaagtgtcggctgggtgtgcttgcaatgagcaacgcgataacgtcgctgcgacaggcagcggagtggggcatgggaagcgccccccaatgctaccggcaacagcaattgccgttgccttgtcatcctatcaagcgaggaaagcgtattaacaatatctatcggctcttcaattttttggttcgccaaacgggtattagtcagattaggacagtctttatgtaataataaagctatccttaacttgcttctgttgtagccagcagctactcttgcttcttagcaatcgcagtaataagggttaaaaagcgttcctcacgcagtctctcgcgctcttcgcgctgttcttcgcggcgttgctcgcgctcctcgctcctctcctcttctaggcgacgctgggtatcgcgctcttgacgatattccgcctcacgcgtagcagctcgttcgtcaatcgctccgagaatcgcaccccagtccgtgctgccctcggcctcaagcctgtccagcattcggtcgaccctacgccgtttacgcgcagactcagacagcagctcggttgttcctgcttctatctgcaatccgagctgctccagctcagatggagtccttccggtgcgtgataccagccagcgacgcatttggtgggacctgtaaataatattgggataagacttaagtttagtacaaaacagcgaaataattaaggggagtatgcttaccgtgttcgtgtttgaagcagctattgtcccggacaccaaaccttggacggactttgggtaataattaggtgtgcttgcatgcataaaacctgtaacgatagttagatataaggggtaaaatcgggcgtagattctgattttgcggtccatttccgcgtatctgaactccttcacggtcttttcggctgttggaaaaagcttctatttcttgcgtttttgtttgcaattggaagccggtcacgtgcacaaattgaatgtattaattggccgacacaagataacagatgatgatgtacggtcagaatgcataaattaccgtcttcctgtctcatatcgtgattgctgcatgatggtgaacttgttaaaaaaatcttaggatgggaatatctacgcggccatgcgctcaattactgtcatttttatcctcgtcatcgtcgtcatcgctttcgtcttcatccgactgtatttcgcactcgtctaccagctccatgtagatcttttcgtatttttgagcacgggcgtgcgtgtccgtccatgtatctgaggtgagggaatcaaacccggtgtcgattttacggcgttgctcctccatatcgctcgcagggtcatcgacaatttttcccttaatgttcgcccagataagctcgacaggctgcaattcggggtggtaaggcggtgtataatagagaagatggccgtgcttcgtggcgatttcagtcgctctgtagattgctttgggtttgttggctcggacaagtatcattaactctgctttcgtgtaactagagtcgtaccaaatctctaagcagcagtacaattttgttaatatctaatacgttagggagagtaacaaattaacttaccatttttctgcagccagtcttgaatatcgaccttaagagttctggaacttggagcacgattgatatggttcttgtggtagctggctccatccatgtgaatattgcagaggtcatattttgcagctaatacagcactcagattttcaaaccacctttcgaactgctccgtgttgaaattcccgtggtaatcatcatcgtgcttgcgttttaggttggactgccaaacctcgcgtgattagtcaatcaacaggccgacaattccattcttttcacgacgaattataccggcgccaaaaattcagaaccttttgggaaaatataaacagtaaaataactaactatacaaacaacaaatgtgattaaaaaaacatttatgcgaattacctggggccgcgaccgctcttcgcatatcatactttatctgtatcgacccatgacagctgcgcaacatggttcaaattgcgaaatgtttcgttcaaatacacctcaggccgaatagggaagttcctcctgttcagattagccagctttttcttgaggtacttgttgcggaaggtgacattggcggtagactctgccaaaatgttgcgggacttgcctttgatgaaccgcatacccattcatcgcaagatacgacgcaatgaacgcaccgaaactacaatgtcgtgcgcttctttcaaacgcttagccagctttggtgctgaaacaggtgtcccgcttttattcatctccgataccaactcacgcaccatggaatgcaaactttcgccgtatttgcgcggtctgccagttggtttctgacctatcatctggaatatatcatatttcgattagtaaaagttaaatatcaattataactgataagcatactgcaaccacccaccgaggcaaactttgggtcattgtacttcttccaatgcccccaaatttccgatatcgcgcccgtcgcgaagcctagacagtcgtgcacatagtctctgacgtctcccttccagttcagcggctttgcctttttgatatcgtggaaatactggtaggcccttgccaccaggtatttttcagcagccgacaatttcttaccaggcgccatttgtcgaatgaaggcgaaagtgggcaacgtactgctagtagaagtattaatagacatcaacttttttaatggtgccatccatacctaatttgagctactggaagtcgagatgtggcgatcttaaaatggacgtaatttattaccattttcgtccaagcctttatggccaggacaatactgcgttgacgctgctactgctgcttgggctctgcagggcagacactgctgcaggagctgtcgatggctgcgacgcatgcagagactgcaccaccatcagacggggttggcaacgatgacaaacggggctcgcccgtgtgcgatagatgcgcttagcttgcgcgacgtctgcaggacagttagggtcacctgtaggcttgcgcgtgttcttgagagcgtagaatttcctcttgatcgagtccgcatcgcgggcaccaaagccgttgggtagcccagtgttgtactgcaactggacggcgttccactggtttgagccgaacggtaggatctgctcgacaagccccagcatgtacagcgtctctggggtggaccaccctcttcctctagccattgtgtcgaatccaataatgaagctgaagctgccaggcgaaacaggaagcacacggagtccagtcaactttggttggacgtcgctatttgaggttacgtcgtcgtattttgcagagaccgcaaaatcgtctcagcaaaatacgagcggttttgtgttccctacccctcaatttgctacggattttgcgtttgtcgaatttgcgatttgcgtgattttctgaaggcccctatttggcacataaattgcaatttacgacagcgtttgtgttagttttggaagagttccagtctctaaagaattactaaaacaaccgatttacaatccgattagatattctttgcggttttcacactaaaagtattcttgcatgaatgcataaaggtacaatccggttcaaaccgtttatctggattccggatcaaaccggtagtatataaagtgattgggcatgttgaagccgttgaatgagcacagtttacattctctaagcgtacgcaacaaattgtcgaacaaaaagcttccacactttcctccacaatatttaggttaatcaccaagatccggaacttatatgcagatgactggcccataggccatgaggtacactgtaccatacccacagggtacacttgcaagtaactccgttacagaattgataaacaccagattggagtcggatacaacaattgcttttcgagtgattgcgccctgacaaaatacttgaatctgattggatagattcaactgtatgacattttgctggatacgacaattgtcatacgctaacagcaaatttgagtgctaaatacatcgtacatgttggccagtgaccgtgccgcgctgcggccagtcatctcattagacagtagcaaaaacgatgtgtacgtgaatgtgcaagtaaaatcaacttgggtggtagtaaactgtaacggggttacacaagagttacccgaagggttatgaagtgggtagacactgtctaacctaaatcagtaggagaatcagtacatggcttcagagccactgattatgcatatgactagggttcactatgctagatagtgaaccggatacatttacaccgtaggcggctttgccgcaataaagggaaatatattcagtttgagattcacacagttaagagttaagggttgactcttggagtccgtaaggtgtacggactcgtacgttctggtattagaacgggctatcttaagccgagactctgtgagtctgttacgtcttcctctgacgctaaagctacggcagccccgctgcacttggtagctcttgtagtcaatccgacacctgagtctgtatagcttgaccctctgtggagaatggagcagttcgctcacttgcccccgaaccagcaggatgcgcttaaaaagctcatgtctttgctaggcccggagggtgtaacgcaacttgcgcatcaaggccccgacgcggtgactgcgcgtctcgaggcgttttcaagctacgagaatgctctgctagagcacctccagcagaggatggcaacggccgctccgccccaagcgcccgcttcgccatccgacgtgggaacaagacccaagccgctcatgttgagcgtgaagaccttcgaaggcaaggagggtgaaagcttgatgctttggacccgtgaggttgagatggctatgagctcagctctacttcggacggagtcgcagcgcgtggcactagctatctcgaagctcggtgggcgagcgagacagtgggcactaacgtccgggacgtcggtcgaggtggccttcccgacgtgggaccagctgaaacagcaattgtcccgggtgttcgctccgcctaacgaggcgtatcgcgtgcgctcacgcttcctggctactcggcagagcaagaaggagttggtggactatgtccaagagttgagaactctcattgctagcatgtcggcggacccactgccggaagcagtcaccgttacggtgttcatggaaggtcttcgcactggcgttgccaggacggaggcgttccgaacccacccgagctcttttgaagaggctgtgagcgtcgcattgaatgcggaacacaactttaagccatcgagacttgggtggagcgcgtcttacgctagcgcgtcgagtggtccggaacccatggacctcagctatgctgaagacgaagaagccgagcttcgtgctgctgagcagcgtcgcggtatccgcagatgtttcatctgtggtgacacccgtcaccttcgtgctgggtgtccgctgcgccatcagcgccaggcttcgtcaagccgctcttcgagttcgagccagggctctggtttgtctcggggaaacgagaagtcccagtaggcgcggggcggcttactggggaagaactaagttctattgagcttgggtgaagggcttcaccaagccatggacgattttgatcgattcgggagcgtcgggtaactacgcccggcgttctacgatggacggaagtcagctttatgctgaggcgctggtagcgcgcgggagtgacatcgtcactgttcgtctcgcgacgggcactcgtgtcacggtgcctaaggtccctgtggacctgggcgtgaagtttttggattttgatagcgtggaacgctgtctggtcttagatctcgattcgagatatgatctcatccttggaatggcgtggctggaacgccacgagccttggatcgattggaggtcgaagacccttggtgctacgcacttctctcctggcggagcattggcgagtcatgagcccacctctgctaggaagcagaagcgcttttggcgcgagcactggaccgagtcggtcaatgtgctgaacatcggagtttccgagttggtggacactgagtgtgtcgagaacgagcgttccgagcgtggctcgcggacggcaggtggagcggcactaattccgctgagcgggcgtgcgtctgagggcgacgccctgttgcgtgccggtgaaggcgcggtcgacaggaagtcgagtgacgatgggcgttgcccggatcaaggatgtggagcggcactaattccgctgagcgggcgtgcgtctgaggacgacgccctgctgcgtgccagcgacggcgcggtcggcacgatgccgaagaacaaggggctttgcccggatgaagatcgtggagtggcacgtaatccactgtgtggaggctgcggatcgtgcagctcttcgctgagtgtcggtaaagacactggagctcccccggagctgaacgaggtggtgacacctggcgtcaagacgcacgcgaaatcacggagctcttcagggcggacggtgtccatgaagaggaggcagcgccgcaaagcgctggctgcgagacgcaaggcgtctgcgatctcacgagtcgagaagggcgtgtcgagcggcgaggctccacgcgagagcgagcagctctatacactcgtgaatggagtgacgggcgacgtcgacggaggtatcaacctcgacgacttgccctcactgtctgctctcctggagctggacgagatgtccttggccgagttcggcgaagccttgaaggctggagacttggccgaggtagtggtcatacgacccgaagaagagttgaactcgtcctcgcttctggatgaagctgtcctggaagacaccaagaaggcgctgaatgcgcggagcggatcggcgatcctgaaggacccgtcggatcccttgtatcaagtggtaaaggattaccaggacggggtttcgaaggagccgccctcggggctacctccggatcgaggtgttcgacacggaatcgatctcgttccgggaacgaagtactgtgtgacgaggcagtggtccttgccgaaggagcagtgtgacgtcattgatgcgttcttccgtgcgaagcacgaggcgggcatggtgtgtgagagtaagtctccaccctctacgccgacgttctgtgtcagaaagccgaatggcaagtggtgtatcgtgcatgctttcaacaagctgaatgccgctaccattccggcgcagacgccgatccctcagaaggatgttcttcagaacaacatgacaggatgtacgatgtacagtgcgctcgacttggtcgatgggtattaccaattgctcatgaggacgagcgacattcctctcactgcggtgagtacaccgagcggcatgctctgggagtggttggtgatgccccaatggctttcgaacgcgccagcgacgtttaatcgtcttgtgacgcagctcttcaggccccatcgggcgtacgcgcaaacgtacttcgatgacatctttgtccacagtcgtgcggagcacggaaagactgatatggagaaccatgtggagcacctgcgtgctgtgctcgaatgcatgcgtcaaaacaagttgtacgccaacattgacaaatgcatcttcggagcggaagagatccccttcttagggtgcttcatcgggaagcgtggcctgagggccgacccggtcaaggtcaaggccattgttgactggccggttcccaagaaccagaaggatcttcgcaagtggcttggcttggccaattacttgcacaagtacagcgagaactacgctgagatggctcggccactctccaatctcctgaagaaggatgcggagtggtgttgggacaccgagcatcaagatgcgtttgcggcaattaaggacagtctccttcatgcgcctactctggctttgccagaccccgctcgtccgtttagtgtcgtctgtgacgcctcggactttgccatcgactgtgccctgctgcaagcagacgccgaggggcgcgagcgcgtggtggcgttcgaatctcgccagctgaaggctacggaaaagaactatcctgtccacgacaaggagctacttgcaatgaagtatgcgctcgtcaagttcagggtgcacctgttgggctcttagccgttcgtgatttacacggatcatgcgtcgttacgcactgcgactcagtcgcttcatctctcgcaaaggatggcccgctggctgtccttcttcgcggagtacaacttcgaggtgaagtacaagcctggcaggcagaatatcctcgcggacgcgctgtcgcgcaggccggattctgagctggctcatgtaacgaccgtgacttcgtcattaccggatttgatccgaacggcttatgccaaggacgacacttgtgtcgcgttgctgaaggctctggggagcaaggagtttcaagactcggacatgaaattgtcagcgcggctgcgcgcgcgactacaccgttattccctcgatggaggcctgttgttctacaacaccggccccgaggatacgccccgcgtggtcatccctcatgatgaggatctgaagtttcgcatcctctatgaggcacacgacacgccgctggccggccatcttggccgtgagaggacctacagctcggggagcacccactactggtggccgaagatgtataagtggacgagcacttacgtgcgcacgtgcgagacgtgtcagcgagtgaagtcgtcacctcatgctgccgcgccgttggcgagttttcctgtcccttcgggctgttggcaatccatgagtatggaatttgtgtttggcctgccggcggacgcggccggcaacacaggagtcgtggtcttcgtggaccgactgagcaagatggctcacattgcggctgtgccggataccatcaatggtaaaggtacagcaacgctgttcttggaccgagtgtttcgacaacacggactccctgagtcgattgtctcggaccgagacccccgcttcacgggcaacttctggagcgcggtctttgcggtgcttggcaccaagctggacatgtccacggcggaccatccgcagaccgatggtcagacagagcgcgtgaatcgcgtcgtcgaggacgtgctccgcagcatttgcgccgagacgccgaagcgctggagcgccatgctgccactcgttgagtttgcgttgaacaacgccgtgcacacctcgacaggctacacgccattctacgtgaacagcttgtctcatccccgcgtcccgctgacgccgccacgtggtggcctcgggcttggtgggggaggagaagccgatttagctgatcggctagccgatgtcagctcggctactgttcgtaaacaggttgacgctttcttgtcgacgcgtctgagtgtcttacgacacgtgcgtgacgcaatggctgagagccaagacaaacaaatggaacatgcagatgccagggccagaggcaatgttgaaagttatgaggtcggggacctggtgctgcttaatgctaagagcctacctacacatgcagtgtctgccgtcttcaagacgaagttgcacccgcgcttcatcggacctttcaaggttgtggccaagaagggccttgcgtacacgctcaatcttccgaagaagatgcggacgcaccccgtcttctacgtgggcttgctcaagccgtaccaggacccgatgcaggtgcagatggaggcaccgagggtgacgaggtcacaggcgcggtcgtcgaggacgcgaccatccacgcgggcaccgcaggcacaggcggaagaatcggcgccggaggtgccgccggcacaacgagagccgcaggtgcaggaggcgcggcagtcggagtctgcatgcgggccaggaggtcgagctgacgctgtagctccccgagctcgcggccacgttgctcatcgcgatcgcgatagtatcgcacccagtcctccagggccccaaggcggtcccagaccgctcgacgcacctcgatccatcgcgtccgcccggcgagctcgtcgagttcggtggcagtccggcccagacgcgcatcaacgtcatggatatgatcccgaaggcgacccgcctgctgccgcgcctccaagagctcactttgagtcgcaaagggccccacagcggcctccaccggccctgctcgatgagcatgggaatctacattaccatgtggagcgcctcctggcgaagcggcggtgccggggtcaaaaccagtatctggtgaaatggcgagggtaccctcactccgagaacccatgggagtttgaggtgcccctccgccaatactgcccagacgtcgtggacgattttgatcagcttgatcaccagcgccccgagggctcaacgccggcacgccggccgtcccgcgcttcccggcaataagctggggagctgctgggtcagcacattgctccgaggctggccctgagccacagcgctcactctctcgcgggaaggagcggctggagtgctcaaaggagcgaagcgcgcagcgctaaactgggtctgcggctgggcgagtgccgagaggctgcgcttggctcggaccttcgcgaaatcgaagcggagcttgcattcaatgcgaacatccactttactgaagctggctcggagagcgtccatggagctgagcttttggctgtgctcggcccaagactcgaactgagcttcgtactcaattgagtcttcccccgggctaagtaccaccgagtacgttcgcatggcgggcacggacttctgctgggcttgcagccgcagcctgtcgcaatactccgcgacaatcgtagactgtggagtgaggagccgctctcgcagagacgtacgcagtgcaagctcctccggagtacgggccgcgggcccaatggtgtgtagcgcgagagactgctggaacgcctggcgacaagcctccgcggggtcgcgaggccggaagccgtagtcggcagtgctggggttcagcagagaccgcagctcggggcgctgggagcgcgtgggagccatctgcgccgcaacctgctcggactgagcttcgtccaaagggttggaaatgacggggcccaggggcacgccctcaccacgagatggcgaataccgtggctcagtgagcgcgcgcagctcgtagaggccggaagagcgttcagggaacgggtttggagttcgcagcggtggccgcggctcctccctcgacggcgcagcgcgctctgcaggtggacggcccggcgagcgcacaggagacgtgtgggcggggcgctcttgatcacgacggctcagagagccaactggggccggcgagccttcttcacggcgtgtcgacggtgtgggagatgaggacgcatctcctcggttcggagaaccctccatggactcgtccagctcgccctcttcaccaaagagttccctaggatccatgatctgacgggttggtgctcgaggggagccggggcttgcgcgctgcgagctgcgcttcaggcgttgcgccgcgaagtactcagacaccgagagcctggaaggcgtcgagggtgtgcgcgcgggcgctggcgttcgcagaggcgcagtgcagcagcacgagaggagcgaggctccgaggcggatctcgcgagaggctgtctgcggtcgaaagactaaaaggctttatgacttgaagtcatgtgagggtgcgttgcaccgagaagttctcagagaagtccacgcgatgtggattgactcgttcgagaaggaggcttgacggaacaagacccggtggttgaccgttaagcgtgaacacccgtgtccacggtttggtgggggagggtgtaacggggttacacaagagttacccgaagggttatgaagtgggtagacactgtctaacctaaatcagtaggagaatcagtacatggcttcagagccactgattatgcatatgactagggttcactatgctagatagtgaaccggatacatttacaccgtaggcggctttgccgcaataaagggaaatatattcagtttgagattcacacagttatgagttaagggttgactcttggagtccgtaaggtgtacggactcgtacgttctggtattagaacggcctatcttaagccgagactctgtgagtctgttacgtcttcctctgacgctaaagctacggcagccccgctgcataaaccctcagcctcttccgttggctctgctgtccactgcttgggcaatggcgcggagcttggaagcgcggacgtgaatgcgcagcacgtactgccaggtgattgggaattgtaccaaaataatggtacgctccatttgcgctcgatgcaatctatggagacgtcggatttgctacgagaaatacgccatgtttatcaccgtagcaaatattttgggtgggctttggtagagctctcctggaatccatatttatttaggtcacatccctatttattattggtttctcctatttagaatcagtcttatgccgccaagatgcaaagctatttaagccccgaacccatttgctctcttaactcttttggtaccggtacaacaaatggcccttctggacagtataatgtctataccgaagtcattatagtaacatgattggctgaaatgatgaagcttgtggatctatacttcttatgtaccatatcatatccagaagaaaactaattttatgttcatcctatcaccaaaccacaattgttttcgagcagcgcttggaccaaaagtttttcactccattcctcagatggccatgaatggcagcttctgatggtggcgacgctgttgaagcccgtgggctgctacttgcgcgtcggggtcgagcgaagccacgacggagacggcggcccggacgcccgtgtggacgtcgagctgtgtgtatgctgcgaccgccgagatgcgctcgctcgtgatcctggtggtggtgatggtgttgacgctgtcgacgatggagtccaagggctacgtcacgtgtgagatgtacggccccgataccacggcgacaatggcgacccagccgtccgcttcgacgccgacctgtgtgtatgtagtaaccgccggcgcggcggaggtgagcgtgctccagctggatcacccagcgttgctggcgttccggcgtgcgaacgatgaaatgcgtgagttcggctgatgcgcgcgtcgcgttcgcgtgcaggcgtccatgcagacgtgtacctggtggctggaatatcgccagcaaacacgactttccgagggagggctgacaaataaatcgagcaagaagcacaagaatacaaactctagccaagatctcggtcaagatcggaggaatcaacagaccaacgtccgtgttgtgcgccctgagtttcggtttgattcggacggtggttttgaagctttccttggaaaagctgaggggcgcgttgtagcagcgcttgctgcctacgacgttatgaccctgccgtttgatactaacctctacgctaagccaagtcaaggtgccgctcaacaggcctgggtgaccttaaccgagtcaaactggactatcatcctcgacaccgtgacagccaactttcagcggcgttgaaaggacacaggtccactctgcctggaaattctcgcgtttgcagcgagggaggaccaggtaggtgaagcaaaccgccgtcgcgctacccgtagccgcacccaagaagcggctaaagacatctacgactttctcacgcaccgacccgacgttcaagtaggtgtcatcgctcgcactcattgggagatgcctcaagatcgccagtcagcaggactgctgtagctgtccccgccacggtaacctttaggcagatgcaacaccttaatgccgttggtgctgcagatcctcctgtagaccgtgacgaggctatataccagacgatagttgtacgtacaaacggctcgtccgagttacagctagcgttgaacgtgcaagaactacgcactgtactcggactgctccgccataattctgtgggcagcggcatcttctcggcacttgtccctccccagagcctgcggataacattgatgacgttgaccaccaagacttttagaaacatagagagtggtctattttataagcaaatatcatgttttctcacacatattgttggaagctgacatggtgcatgctgccgggccagatctgcgtaggcctgcaacagcgaaacgaagcagatgtacttacgtatctgtagcacagattcatatctgtagcatgatttgttggttaacccttgctctctcccaatgccttcacttcatattttcatctcttttgcgcaccagtgcacaaactaacagatcttcccctcgctccgctcggttgaagcggcccacccaccccttgctctagcgcagtaccaccgctctcaatcgaaactccggagcgtacatcttgttccttctggctcttgcctcgccttgcgttctctatgtgcgattttgactggtgccgctaactcgcctttacggtatatgagatctcctacttcggaccccaaaatattgaagttgtggtgtcgtatttagtgcacagaatgtacgcatctctgtaccatagatatcatcgatccaaatacatgtactattgagcagctatttcagcttctctattgggttcataaagcctcgctatctacgtctgctactactggtaccagcgtttcaatgtctcggttcgggtcaacaaagtggcgaatcacagggacctcttcgagcagttgtttcagcagtgcccattcaggttcggtatcaagtagattctggtcgggagcgcaagcgtccacaccttgcttaggcacgatcatcgccttcacaaacccactcttcacggctgcagccaacagcgacctccacgcttctttcgtccagcggcttagctgtcgccgctagggtgcttttagcttgaacgtggttgatgtgcggagttgttgcagcatattacccacccaattcttgcgcatagtctcttctaaaggcttattccaagagatatatccaggctgacaagcaaaagtgtagtcatgcggaatgggcatgagctctacgtttatcagccgcatgaataatttcacgtccaaaagccaatgcccggaaaagtcgtcgagcaactgcaatatgggcacgtgcatgtctttcctctacagaaagtggtaaatcagaaattcgatggtcagttcgctgtttcaccagccatcacgattgccataaatttgaaatccattctgctcgtcccgaaactgcctccacagcgtagcgccaaagccgtgttggaaagctttatggtacaactacgtgcgccagccgaacagcccaaaaaacgagttttccttcatgtcgacgcaagaaggcgaaaggaaagtggacaggcgtcatcggcacgcttccgaactgcaacgcttcatgaggaccggtaagtttgcagctaactttgtagccttgtatgccggaggtgagttccagcatgagcaccgtgagatgtacaagcgtggtgttgatgatccagtgctgatggcagccgaagtaacgggtaaatacgtatatcgttgcccgactgcgctttattacaattcatcccaggtgctggacaatctgataagggtcgatcccgcgtccgacagcccagcggcaataaactgtacaaggaccatcgcaatcgagtgtcgaagggtctcgcctcacaacatctaaacgggctaatgatggagacaacttgaataaatcggaaataaaatatgtgaaggcatattactggaagatgaggcaacgatctttgggttatgagcccaacacgcttcctgcgccaaagtgctagctcaatttcacacatccccaacgacacacaaaaacgcgccccagcaaaccacacacaaaccaacgcaaacgcccgcgcgcgagctctccagaccgacaattgatgcccccaacgagcttatcgttcacgagatatctcccaccaaacctaggtacacgtacccgcggcacaacaaactgccactgcgcacaggcgcctcgccgccgcgcgaccaaaccagggcccatcacacaccgccaggcgcgacagcgcgtcgtggacacgcccctactgttgcctggtgccgcgccgccgggtttaccaacccaccgcttgaaccgtggcgggactcgatcccgccgtcgttgtgcggcctgccaggcacgaggggcgaaggcggggtcagtgcaggcagcgtggaggggcagcaggacaggcggaagccgctagaagccgcaaaaaagaggcgaaggagcacccgaacggcgcgggtaaaagttagcacttgttggtctcgatccaacgacctttgggttatgagcccaacacgcttcctctgcgccaaagtgctagctcaatttcacacatccccaacgacacacaaaaacgcgccccagcaaaccacacacaaaccaacgcaaacgcccgcgcgcgagctctccagaccgacaattgatgcccccaacgagcttatcgttcacgagatatctcccaccaaacctaggtacacgtacccgcggcacaacaaactgccactgcgcacaggcgcctcgccgccgcgcgaccaaaccagggcccatcacacaccgccaggcgcgacagcgcgtcgtggacacgcccctactgttgcctggtgccgcgccgccgggtttaccaacccaccgcttgaaccgtggcgggactcgatcccgccgtcgttgtgcggcctgccaggcacgaggggcgaaggcggggtcagtgcaggcagcgtggaggggcagcaggacaggcggaagccgctagaagccgcaacaaagaggcgagggagcacccgaacggcgcgggtaaaagttagcacttgttggtctcgatccaacgacctttgggttatgagcccaacacgcttcctctgcgccaaagtgctagctcaatttcacacatccccaacgacacacaaaaacgcaccccagcaaaccacacacaaaccaacgcaaacgcccgcgcgcgagctctccagaccgacaattgatgcccccaacgagcttatcgttcacgagatatctcccaccaaacctaggtacacgtacccgcggcacaacaaactgccactgcgcacaggcgcctcgccgccgcgcgaccaaaccagggcccatcacacaccgccaggcgcgacagcgcgtcgtggacacgcccctactgttgcctggtgccgcgccgccgggtttaccaacccaccgcttgaaccgtggcgggactcgatcccgccgtcgttgtgcggcctgccaggcacgaggggcgaaggcggggtcagtgcaggcagcgtggaggggcagcaggacaggcggaagctgctagaagccgcaacaaagaggcgaaggagcacccgaacggcgcgggtaaaagttagcacttgttggtctcgatccaacgacctttgggttatgagcccaacacgcttcctctgcgccaaagtgctagctcaatttcacacatccccaacgacacacaaaaacgcaccccagcaaaccacacacaaaccaacgcaaacgcccccgcgcgagctctccagaccgacaattgatgcccccaacgagcttatcgttcacgagatatctcccaccaaacctaggtacacgtacccgcggcacaacaaactgccactgcgcacaggcgcctcgccgccgcgcgaccaaaccagggcccatcacacaccgccaggcgcgacagcgcgtcgtggacacgcccctactgttgcctggtgccgcgccgccgggtttaccaacccaccgcttgaaccgtggcgggactcgatcccgccgtcgttgtgcggcctgccaggcacgaggggcgaaggcggggtcagtgcaggcagcgtggaggggcagcaggacaggcggaagctgctagaagccgcaacaaagaggcgagggagcacccgaacggcgcgggtaaaagttagcacttgttggtctcgatccaacgacctttgggttatgagcccaacacgcttcctctgcgccaaagtgctagctcaatttcacacatccccaacgacacacaaaaacgcgccccagcaaaccacacacaaaccaacgcaaacgcccgcgcgcgagctctccagaccgacaattgatgcccccaacgagcttatcgttcacgagatatctcccaccaaacctaggtacacgtacccgcggcacaacaaactgccactgcgcacaggcgcctcgccgccgcgcgaccaaaccagggcccatcacacaccgccaggcgcgacagcgcgtcgtggacacgcccctactgttgcctggtgccgcgccgccgggtttaccaacccaccgcttgaaccgtggcgggactcgatcccgccgtcgttgtgcggcctgccaggcacgaggggcgaaggcggggtcagtgcaggcagcgtggaggggcagcaggacaggcggaagctgctagaagccgcaacaaagaggcgagggagcacccgaacggcgcgggtaaaagttagcacttgttggtctcgatccaacgacctttgggttatgagcccaacacgcttcctctgcgccaaattgctagctcaatttcacacatccccaacgacacacaaaaacgcgccccagcaaaccacacacaaaccaacgcaaacgcccgcgcgcgagctctccagaccgacaattgatgcccccaacgagcttatcgttcacgagatatctcccaccaaacctaggtacacgtacccgcggcacaacaaactgccactgcgcacaggcgcctcgccgccgcgcgaccaaaccagggcccatcacacaccgccaggcgcgacagcgcgtcgtggacacgcccctactgttgcctggtgccgcgccgccgggtttaccaacccaccgcttgaaccgtggcgggactcgatcccgccgtcgttgtgcggcctgccaggcacgaggggcgaaggcggggtcagtgcaggcagcgtggaggggcagcaggacaggcggaagccgctagaagccgcaaaaaagaggcgaaggagcacccgaacggcgcgggtaaaagttagcacttgttggtctcgatccaacgacctttgggttatgagcccaacacgcttcctctgcgccaaagtgctagctcaatttcacacatccccaacgacacacaaaaacgcgccccagcaaaccacacacaaaccaacgcaaacgcccgcgcgcgagctctccagaccgacaattgatgcccccaacgagcttatcgttcacgagatatctcccaccaaacctaggtacacgtacccgcggcacaacaaactgccactgcgcacaggcgcctcgccgccgcgcgaccaaaccagggcccatcacacaccgccaggcgcgacagcgcgtcgtggacacgcccctactgttgcctggtgccgcgccgccgggtttaccaacccaccgcttgaaccgtggcgggactcgatcccgccgtcgttgtgcggcctgccaggcacgaggggcgaaggcggggtcagtgcaggcagcgtggaggggcagcaggacaggcggaagctgctagaagccgcaacaaagaggcgaaggagcacccgaacggcgcgggtaaaagttagcacttgttggtctcgatccaacgacctttgggttatgagcccaacacgcttcctctgcgccaaagtgctagctcaatttcacacatccccaacgacacacaaaaacgcgccccagcaaaccacacacaaaccaacgcaaacgcccgcgcgcgagctctccagaccgacaattgatgcccccaacgagcttatcgttcacgagatatctcccaccaaacctaggtacacgtacccgcggcacaacaaactgccactgcgcacaggcgcctcgccgccgcgcgaccaaaccagggcccatcacacaccgccaggcgcgacagcgcgtcgtggacacgcccctactgttgcctggcgccgcgccgccgggtttaccaacccaccgcttgaaccgtggcgggactcgatcccgccgtcgttgtgcggcctgccaggcacgaggggcgaaggcggggtcagtgcaggcagcgtggaggggcagcaggacaggcggaagccgctagaagccgcaaaaaagaggcgaaggagcacccgaacggcgcgggtaaaagttagcacttgttggtctcgatccaacgacctttgggttatgagcccaacacgcttcctctgcgccaaagtgctagctcaatttcacacatccccaacgacacacaaaaacgcgccccagcaaaccacacacaaaccaacgcaaacgcccgcgcgcgagctctccagaccgacaattgatgcccccaacgagcttatcgttcacgagatatctcccaccaaacctaggtacacgtacccgcggcacaacaaactgccactgcgcacaggcgcctcgccgccgcgcgaccaaaccagggcccatcacacaccgccaggcgcgacagcgcgtcgtggacacgcccctactgttgcctggtgccgcgccgccgggtttaccaacccaccgcttgaaccgtggcgggactcgatcccgccgtcgttgtgcggcctgccaggcacgaggggcgaaggcggggtcagtgcaggcagcgtggaggggcagcaggacaggcggaagccgctagaagccgcaacaaagaggcgagggagcacccgaacggcgcgggtaaaagttagcacttgttggtctcgatccaacgacctttgggttatgagcccaacacgcttcctctgcgccaaattgctagctcaatttcacacatccccaacgacacacaaaaacgcgccccagcaaaccacacacaaggggatcctcagagtcgnnnnnnnnnnnnnnnnnnnnnnnnnnnnnnnnnnnnnnnnnnnnnnnnnnnnnnnnnnnnnnnnnnnnnnnnnnnnnnnnnnnnnnnnnnnnnnnnnnnngcagcaggacaggcggaagccgctagaagccgcaaaaaagaggcgaaggagcacccgaacggcgcgggtaaaagttagcacttgttggtctcgatccaacgacctttgggttatgagcccaacacgcttcctctgcgccaaagtgctagctcaatttcacacatccccaacgacacacaaaaacgcgccccagcaaaccacacacaaaccaacgcaaacgcccgcgcgcgagctctccagaccgacaattgatgcccccaacgagcttatcgttcacgagatatctcccaccaaacctaggtacacgtacccgcggcacaacaaactgccactgcgcacaggcgcctcgccgccgcgcgaccaaaccagggcccatcacacaccgccaggcgcgacagcgcgtcgtggacacgcccctactgttgcctggtgccgcgccgccgggtttaccaacccaccgcttgaaccgtggcgggactcgatcccgccgtcgttgtgcggcctgccaggcacgaggggcgaaggcggggtcagtgcaggcagcgtggaggggcagcaggacaggcggaagccgctagaagccgcaaaaaagaggcgaaggagcacccgaacggcgcgggtaaaagttagcacttgttggtctcgatccaacgacctttgggttatgagcccaacacgcttcctctgcgccaaagtgctagctcaatttcacacatccccaacgacacacaaaaacgcgccccagcaaaccacacacaaaccaacgcaaacgcccgcgcgcgagctctccagaccgacaattgatgcccccaacgagcttatcgttcacgagatatctcccaccaaacctaggtacacgtacccgcggcacaacaaactgccactgcgcacaggcgcctcgccgccgcgcgaccaaaccagggcccatcacacaccgccaggcgcgacagcgcgtcgtggacacgcccctactgttgcctggtgccgcgccgccgggtttaccaacccaccgcttgaaccgtggcgggactcgatcccgccgtcgttgtgcggcctgccaggcacgaggggcgaaggcggggtcagtgcaggaagcgtggaggggcagcaggacaggcggaagccgctagaagccgcaaaaaagaggcgaaggagcacccgaacggcgcgggtaaaagttagcacttgttggtctcgatccaacgacctttgggttatgagcccaacacgcttcctctgcgccaaagtgctagctcaatttcacacatccccaacgacacacaaaaacgcaccccagcaaaccacacacaaaccaacgcaaacgcccgcgcgcgagctctccagaccgacaattgatgcccccaacgagcttatcgttcacgagatatctcccaccaaacctaggtacacgtacccgcggcacaacaaactgccactgcgcacaggcgcctcgccgccgcgcgaccaaaccagggcccatcacacaccgccaggcgcgacagcgcgtcgtggacacgcccctactgttgcctggtgccgcgccgccgggtttaccaacccaccgcttgaaccgtggcgggactcgatcccgccgtcgttgtgcggcctgccaggcacgaggggcgaaggcggggtcagtgcaggcagcgtggaggggcagcaggacaggcggaagctgctagaagccgcaaaaaagaggcgaaggagcacccgaacggcgcgggtaaaagttagcacttgttggtctcgatccaacgacctttgggttatgagcccaacacgcttcctctgcgccaaagtgctagctcaatttcacacatccccaacgacacacaaaaacgcgccccagcaaaccacacacaaaccaacgcaaacgcccgcgcgcgagctctccagaccgacaattgatgcccccaacgagcttatcgttcacgagatatctcccaccaaacctaggtacacgtacccgcggcacaacaaactgccactgcgcacaggcgcctcgccgccgcgcgaccaaaccagggcccatcacacaccgccaggcgcgacagcgcgtcgtggacacgcccctactgttgcctggtgccgcgccgccgggtttaccaacccaccgcttgaaccgtggcgggactcgatcccgccgtcgttgtgcggcctgccaggcacgaggggcgaaggcggggtcagtgcaggcagcgtggaggggcagcaggacaggcggaagccgctagaagccgcaaaaaagaggcgaaggagcacccgaacggcgcgggtaaaagttagcacttgttggtctcgatccaacgacctttgggttatgagcccaacacgcttcctctgcgccaaagtgctagctcaatttcacacatccccaacgacacacaaaaacgcgccccagcaaaccacacacaaaccaacgcaaacgcccgcgcgcgagctctccagaccgacaattgatgcccccaacgagcttatcgttcacgagatatctcccaccaaacctaggtacacgtacccgcggcacaacaaactgccactgcgcacaggcgcctcgccgccgcgcgaccaaaccagggcccatcacacaccgccaggcgcgacagcgcgtcgtggacacgcccctactgttgcctggtgccgcgccgccgggtttaccaacccaccgcttgaaccgtggcgggactcgatcccgccgtcgttgtgcggccttccaggcacgaggggcgaaggcggggtcagtgcaggcagcgtggaggggcagcaggacaggcggaagccgctagaagccgcaaaaaagaggcgaaggagcacccgaacggcgcgggtaaaagttagcacttgttggtctcgatccaacgacctttgggttatgagcccaacacgcttcctctgcgccaaagtgctagctcaatttcacacatccccaacgacacacaaaaacgcgccccagcaaaccacacacaaaccaacgcaaacgcccgcgcgcgagctctccagaccgacaattgatgcccccaacgagcttatcgttcacgagatatctcccaccaaacctaggtacacgtacccgcggcacaacaaactgccactgcgcacaggcgcctcgccgccgcgcgaccaaaccagggcccatcacacaccgccaggcgcgacagcgcgtcgtggacacgcccctactgttgcctggtgccgcgccgccgggtttaccaacccaccgcttgaaccgtggcgggactcgatcccgccgtcgttgtgcggcctgccaggcacgaggggcgaaggcggggtcagtgcaggcagcgtggaggggcagcaggacaggcggaagctgctagaagccgcaaaaaagaggcgaaggagcacccgaacggcgcgggtaaaagttagcacttgttggtctcgatccaacgacctttgggttatgagcccaacacgcttcctctgcgccaaagtgctagctcaatttcacacatccccaacgacacacaaaaacgcgccccagcaaaccacacacaaaccaacgcaaacgcccgcgcgcgagctctccagaccgacaattgatgcccccaacgagcttatcgttcacgagatatctcccaccaaacctaggtacacgtacccgcggcacaacaaactgccactgtgcacaggcgcctcgccgccgcgcgaccaaaccagggcccatcacacaccgccaggcgcgacagcgcgtcgtggacacgcccctactgttgcctggtgccgcgccgccgggtttaccaacccaccgcttgaaccgtggcgggactcgatcccgccgtcgttgtgcggcctgccaggcacgaggggcgaaggcggggtcagtgcaggaagcgtggaggggcagcaggacaggcggaagccgctagaagccgcaaaaaagaggcgaaggagcacccgaacggcgcgggtaaaagttagcacttgttggtctcgatccaacgacctttgggttatgagcccaacacgcttcctctgcgccaaagtgctagctcaatttcacacatccccaacgacacacaaaaacgcgccccagcaaaccacacacaaaccaacgcaaacgcccgcgcgcgagctctccagaccgacaattgatgcccccaacgagcttatcgttcacgagatatctcccaccaaacctaggtacacgtacccgcggcacaacaaactgccactgcgcacaggcgcctcgccgccgcgcgaccaaaccagggcccatcacacaccgccaggcgcgacagcgcgtcgtggacacgcccctactgttgcctggtgccgcgccgccgggtttaccaacccaccgcttgaaccgtggcgggactcgatcccgccgtcgttgtgcggcctgccaggcacgaggggcgaaggcggggtcagtgcaggaagcgtggaggggcagcaggacaggcggaagccgctagaagccgcaaaaaagaggcgaaggagcacccgaacggcgcgggtaaaagttagcacttgttggtctcgatccaacgacctttgggttatgagcccaacacgcttcctctgcgccaaagtgctagctcaatttcacacatccccaacgacacacaaaaacgcgccccagcaaaccacacacaaaccaacgcaaacgcccgcgcgcgagctctccagaccgacaattgatgcccccaacgagcttatcgttcacgagatatctcccaccaaacctaggtacacgtacccgcggcacaacaaactgccactgcgcacaggcgcctcgccgccgcgcgaccaaaccagggcccatcacacaccgccaggcgcgacagcgcgtcgtggacacgcccctactgttgcctggtgccgcgccgccgggtttaccaacccaccgcttgaaccgtggcgggactcgatcccgccgtcgttgtgcggcctgccaggcacgaggggcgaaggcggggtcagtgcaggcagcgtggaggggcagcaggacaggcggaagctgctagaagccgcaacaaagaggcgagggagcacccgaacggcgcgggtaaaagttagcacttgttggtctcgatccaacgacctttgggttatgagcccaacacgcttcctctgcgccaaagtgctagctcaatttcacacatccccaacgacacacaaaaacgcgccccagcaaaccacacacaaaccaacgcaaacgcccccgcgcgacctctccagaccgacaattgatgcccccaacgagcttatcgttcacgagatatctcccaccaaacctaggtacacgtacccgcggcacaacaaactgccactgcgcacaggcgcctcgccgccgcgcgaccaaaccagggcccatcacacaccgccaggcgcgacagcgcgtcgtggacacgcccctactgttgcctggtgccgcgccgccgggtttaccaacccaccgcttgaaccgtggcgggactcgatcccgccgtcgttgtgcggcctgccaggcacgaggggcgaaggcggggtcagtgcaggcagcgtggaggggcagcaggacaggcggaagctgctagaagccgcaacaaagaggcgaaggagcacccgaacggcgcgggtaaaagttagcacttgttggtctcgatccaacgacctttgggttatgagcccaacacgcttcctctgcgccaaagtgctagctcaatttcacacatccccaacgacacacaaaaacgcgccccagcaaaccacacacaaaccaacgcaaacgcccgcgcgcgagctctccagaccgacaattgatgcccccaacgagcttatcgttcacgagatatctcccaccaaacctaggtacacgtacccgcggcacaacaaactgccactgcgcacaggcgcctcgccgccgcgcgaccaaaccagggcccatcacacaccgccaggcgcgacagcgcgtcgtggacacgcccctactgttgcctggtgccgcgccgccgggtttaccaacccaccgcttgaaccgtggcgggactcgatcccgccgtcgttgtgcggcctgccaggcacgaggggcgaaggcggggtcagtgcaggcagcgtggaggggcagcaggacaggcggaagctgctagaagccgcaacaaagaggcgaaggagcacccgaacggcgcgggtaaaagttagcacttgttggtctcgatccaacgacctttgggttatgagcccaacacgcttcctctgcgccaaagtgctagctcaatttcactcatccccaacgacacacaaaaacgcgccccagcaaaccacacacaaaccaacgcaaacgcccgcgcgcgagctctccagaccgacaattgatgcccccaacgagcttatcgttcacgagatatctcccaccaaacctaggtacacgtacccgcggcacaacaaactgccactgcgcacaggcgcctcgccgccgcgcgaccaaaccagggcccatcacacaccgccaggcgcgacagcgcgtcgtggacacgcccctactgttgcctggtgccgcgccgccgggtttaccaacccaccgcttgaaccgtggcgggactcgatcccgccgtcgttgtgcggcctgccaggcacgaggggcgaaggcggggtcagtgcaggcagcgtggaggggcagcaggacaggcggaagctgctagaagccgcaaaaaagaggcgagggagcacccgaacggcgcgggtaaaagttagcacttgttggtctcgatccaacgacctttgggttatgagcccaacacgcttcctctgcgccaaagtgctagctcaatttcacacatccccaacgacacacaaaaacgcgccccagcaaaccacacacaaaccaacgcaaacgcccgcgcgcgagctctccagaccgacaattgatgcccccaacgagcttatcgttcacgagatatctcccaccaaacctaggtacacgtacccgcggcacaacaaactgccactgcgcacaggcgcctcgccgccgcgcgaccaaaccagggcccatcacacaccgccaggcgcgacagcgcgtcgtggacacgcccctactgttgcctggtgccgcgccgccgggtttaccaacccaccgcttgaaccgtggcgggactcgatcccgccgtcgttgtgcggcctgccaggcacgaggggcgaaggcggggtcagtgcaggcagcgtggaggggcagcaggacaggcggaagccgctagaagccgcaaaaaagaggcgaaggagcacccgaacggcgcgggtaaaagttagcacttgttggtctcgatccaacgacctttgggttatgagcccaacacgcttcctctgcgccaaagtgctagctcaatttcacacatccccaacgacacacaaaaacgcgccccagcaaaccacacacaaaccaacgcaaacgcccgcgcgcgagctctccagaccgacaattgatgcccccaacgagcttatcgttcacgagatatctcccaccaaacctaggtacacgtacccgcggcacaacaaactgccactgcgcacaggcgcctcgccgccgcgcgaccaaaccagggcccatcacacaccgccaggcgcgacagcgcgtcgtggacacgcccctactgttgcctggtgccgcgccgccgggtttaccaacccaccgcttgaaccgtggcgggactcgatcccgccgtcgttgtgcggcctgccaggcacgaggggcgaaggcggggtcagtgcaggcagcgtggaggggcagcaggacaggcggaagctgctagaagccgcaaaaaagaggcgaaggagcacccgaacggcgcgggtaaaagttagcacttgttggtctcgatccaacgacctttgggttatgagcccaacacgcttcctctgcgccaaagtgctagctcaatttcacacatccccaacgacacacaaaaacgcgccccagcaaaccacacacaaaccaacgcaaacgcccgcgcgcgagctctccagaccgacaattgatgcccccaacgagcttatcgttcacgagatatctcccaccaaacctaggtacacgtacccgcggcacaacaaactgccactgcgcacaggcgcctcgccgccgcgcgaccaaaccagggcccatcacacaccgccaggcgcgacnnnnnnnnnnnnnnnnnnnnnnnnnnnnnnnnnnnnnnnnnnnnnnnnnnnnnnnnnnnnnnnnnnnnnnnnnnnnnnnnnnnnnnnnnnnnnnnnnnnnnnnnnnnnnnnnnnnnnnnnnnnnnnnnnnnnnnnnnnnnnnnnnnnnnnnnnnnnnnnnnnnnnnnnnnnnnnnnnnnnnnnnnnnnnnnnnnnnnnnnnnnnnnnnnnnnnnnnnnnnnnnnnnnnnnnnnnnnnnnnnnnnnnnnnnnnnnnnnnnnnnnnnnnnnnnnnnnnnnnnnnnnnnnnnnnnnnnnnnnnnnnnnnnnnnnnnnnnnnnnnnnnnnnnnnnnnnnnnnnnnnnnnnnnnnnnnnnnnnnnnnnnnnnnnnnnnnnnnnnnnnnnnnnnnnnnnnnnnnnnnnnnnnnnnnnnnnnnnnnnnnnnnnnnnnnnnnnnnnnnnnnnnnnnnnnnnnnnnnnnnnnnnnnnnnnnnnnnnnnnnnnnnnnnnnnnnnnnnnnnnnnnnnnnnnnnnnnnnnnnnnnnnnnnnnnnnnnnnnnnnnnnnnnnnnnnnnnnnnnnnnnnnnnnnnnnnnnnnnnnnnnnnnnnnnnnnnnnnnnnnnnnnnnnnnnnnnnnnnnnnnnnnnnnnnnnnnnnnnnnnnnnnnnnnnnnnnnnnnnnnnnnnnnnnnnnnnnnnnnnnnnnnnnnnnnnnnnnnnnnnnnnnnnnnnnnnnnnnnnnnnnnnnnnnnnnnnnnnnnnnnnnnnnnnnnnnnnnnnnnnnnnnnnnnnnnnnnnnnnnnnnnnnnnnnnnnnnnnnnnnnnnnnnnnnnnnnnnnnnnnnnnnnnnnnnnnnnnnnnnnnnnnnnnnnnnnnnnnnnnnnnnnnnnnnnnnnnnnnnnnnnnnnnnnnnccaacgacacacaaaaacgcgccccagcaaaccacacacaaaccaacgcaaacgcccccgcgcgacctctccagaccgacaattgatgcccccaacgagcttatcgttcacgagatatctcccaccaaacctaggtacacgtacccgcggcacaacaaactgccactgcgcacaggcgcctcgccgccgcgcgaccaaaccagggcccatcacacaccgccaggcgcgacagcgcgtcgtggacacgcccctactgttgcctggtgccgcgccgccgggtttaccaacccaccgcttgaaccgtggcgggactcgatcccgccgtcgttgtgcggcctgccaggcacgaggggcgaaggcggggtcagtgcaggcagcgtggaggggcagcaggacaggcggaagctgctagaagccgcaacaaagaggcgaaggagcacccgaacggcgcgggtaaaagttagcacttgttggtctcgatccaacgacctttgggttatgagcccaacacgcttcctctgcgccaaagtgctagctcaatttcacacatccccaacgacacacaaaaacgcgccccagcaaaccacacacaaaccaacgcaaacgcccgcgcgcgagctctccagaccgacaattgatgcccccaacgagcttatcgttcacgagatatctcccaccaaacctaggtacacgtacccgcggcacaacaaactgccactgcgcacaggcgcctcgccgccgcgcgaccaaaccagggcccatcacacaccgccaggcgcgacagcgcgtcgtggacacgcccctactgttgcctggtgccgcgccgccgggtttaccaacccaccgcttgaaccgtggcgggactcgatcccgccgtcgttgtgcggcctgccaggcacgaggggcgaaggcggggtcagtgcaggcagcgtggaggggcagcaggacaggcggaagctgctagaagccgcaacaaagaggcgaaggagcacccgaacggcgcgggtaaaagttagcacttgttggtctcgatccaacgacctttgggttatgagcccaacacgcttcctctgcgccaaagtgctagctcaatttcacacatccccaacgacacacaaaaacgcgccccagcaaaccacacacaaaccaacgcaaacgcccgcgcgcgagctctccagaccgacaattgatgcccccaacgagcttatcgttcacgagatatctcccaccaaacctaggtacacgtacccgcggcacaacaaactgccactgcgcacaggcgcctcgccgccgcgcgaccaaaccagggcccatcacacaccgccaggcgcgacagcgcgtcgtggacacgcccctactgttgcctggtgccgcgccgccgggtttaccaacccaccgcttgaaccgtggcgggactcgatcccgccgtcgttgtgcggcctgccaggcacgaggggcgaaggcggggtcagtgcaggcagcgtggaggggcagcaggacaggcggaagctgctagaagccgcaaaaaagaggcgaaggagcacccgaacggcgcgggtaaaagttagcacttgttggtctcgatccatcgacctttgggttatgagcccaacacgcttcctctgcgccaaagtgctagctcaattcacannnnnnnnnnnnnnnnnnnnnnnnnnnnnnnnnnnnnnnnnnnnnnnnnnnnnnnnnnnnnnnnnnnnnnnnnnnnnnnnnnnnnnnnnnnnnnnnnnnnnnnnnnnnnnnnnnnnnnnnnnnnnnnnnnnnnnnnnnnnnnnnnnnnnnnnnnnnnnnnnnnnnnnnnnnnnnnnnnnnnnnnnnnnnnnnnnnnnnnnnnnnnnnnnnnnnnnnnnnnnnnnnnnnnnnnnnnnnnnnnnnnnnnnnnnnnnnnnnnnnnnnnnnnnnnnnnnnnnnnnnnnnnnnnnnnnnnnnnnnnnnnnnnnnnnnnnnnnnnnnnnnnnnnnnnnnnnnnnnnnnnnnnnnnnnnnnnnnnnnnnnnnnnnnnnnnnnnnnnnnnnnnnnnnnnnnnnnnnnnnnnnnnnnnnnnnnnnnnnnnnnnnnnnnnnnnnnnnnnnnnnnnnnnnnnnnnnnnnnnnnnnnnnnnnnnnnnnnnnnnnnnnnnnnnnnnnnnnnnnnnnnnnnnnnnnnnnnnnnnnnnnnnnnnnnnnnnnnnnnnnnnnnnnnnnnnnnnnnnnnnnnnnnnnnnnnnnnnnnnnnnnnnnnnnnnnnnnnnnnnnnnnnnnnnnnnnnnnnnnnnnnnnnnnnnnnnnnnnnnnnnnnnnnnnnnnnnnnnnnnnnnnnnnnnnnnnnnnnnnnnnnnnnnnnnnnnnnnnnnnnnnnnnnnnnnnnnnnnnnnnnnnnnnnnnnnnnnnnnnnnnnnnnnnnnnnnnnnnnnnnnnnnnnnnnnnnnnnnnnnnnnnnnnnnnnnnnnnnnnnnnnnnnnnnnnnnnnnnnnnnnnnnnnnnnnnnnnnnnnnnnnnnnnnnnnnnnnnnnnnnnnnnnnnnnnnnnnnnnnnnnnnnnnnnnnnnnnnnnnnnnnnnnnnnnnnnnnnnnnnnnnnnnnnnnnnnnnnnnnnnnnnnnnnnnnnnnnnnnnnnnnnnnnnnnnnnnnnnnnnnnnnnnnnnnnnnnnnnnnnnnnnnnnnnnnnnnnnnnnnnnnnnnnnnnnnnnnnnnnnnnnnnnnnnnnnnnnnnnnnnnnnnnnnnnnnnnnnnnnnnnnnnnnnnnnnnnnnnnnnnnnnnnnnnnnnnnnnnnnnnnnnnnnnnnnnnnnnnnnnnnnnnnnnnnnnnnnnnnnnnnnnnnnnnnnnnnnnnnnnnnnnnnnnnnnnnnnnnnnnnnnnnnnnnnnnnnnnnnnnnnnnnnnnnnnnnnnnnnnnnnnnnnnnnnnnnnnnnnnnnnnnnnnnnnnnnnnnnnnnnnnnnnnnnnnnnnnnnnnnnnnnnnnnnnnnnnnnnnnnnnnnnnnnnnnnnnnnnnnnnnnnnnnnnnnnnnnnnnnnnnnnnnnnnnnnnnnnnnnnnnnnnnnnnnnnnnnnnnnnnnnnnnnnnnnnnnnnnnnnnnnnnnnnnnnnnnnnnnnnnnnnnnnnnnnnnnnnnnnnnnnnnnnnnnnnnnnnnnnnnnnnnnnnnnnnnnnnnnnnnnnnnnnnnnnnnnnnnnnnnnnnnnnnnnnnnnnnnnnnnnnnnnnnnnnnnnnnnnnnnnnnnnnnnnnnnnnnnnnnnnnnnnnnnnnnnnnnnnnnnnnnnnnnnnnnnnnnnnnnnnnnnnnnnnnnnnnnnnnnnnnnnnnnnnnnnaggatccccctagaagccgcaaaaaagaggcgaaggagcacccgaacggcgcgggtaaaagttagcacttgttggtctcgatccaacgacctttgggttatgagcccaacacgcttcctctgcgccaaagtgctagctcaatttcacacatccccaacgacacacaaaaacgcgccccagcaaaccacacacaaaccaacgcaaacgcccgcgcgcgagctctccagaccgacaattgatgcccccaacgagcttatcgttcacgagatatctcccaccaaacctaggtacacgtacccgcggcacaacaaactgccactgcgcacaggcgcctcgccgccgcgcgaccaaaccagggcccatcacacaccgccaggcgcgacagcgcgtcgtggacacgcccctactgttgcctggtgccgcgccgccgggtttaccaacccaccgcttgaaccgtggcgggactcgatcccgccgtcgttgtgcggcctgccaggcacgaggggcgaaggcggggtcagtgcaggcagcgtggaggggcagcaggacaggcggaagctgctagaagccgcaaaaaagaggcgaaggagcacccgaacggcgcgggtaaaagttagcacttgttggtctcgatccaacgacctttgggttatgagcccaacacgcttcctctgcgccaaagtgctagctcaatttcacacatccccaacgacacacaaaaacgcgccccagcaaaccacacacaaaccaacgcaaacgcccgcgcgcgagctctccagaccgacaattgatgcccccaacgagcttatcgttcacgagatatctcccaccaaacctaggtacacgtacccgcggcacaacaaactgccactgcgcacaggcgcctcgccgccgcgcgaccaaaccagggcccatcacacaccgccaggcgcgacagcgcgtcgtggacacgcccctactgttgcctggcgccgcgccgccgggtttaccaacccaccgcttgaaccgtggcgggactcgatcccgccgtcgttgtgcggcctgccaggcacgaggggcgaaggcggggtcagtgcaggcagcgtggaggggcagcaggacaggcggaagctgctagaagccgcaaaaaagaggcgaaggagcacccgaacggcgcgggtaaaagttagcacttgttggtctcgatccaacgacctttgggttatgagcccaacacgcttcctctgcgccaaagtgctagctcaatttcacacatccccaacgacacacaaaaacgcgccccagcaaaccacacacaaaccaacgcaaacgcccgcgcgcgagctctccagaccgacaattgatgcccccaacgagcttatcgttcacgagatatctcccaccaaacctaggtacacgtacccgcggcacaacaaactgccactgcgcacaggcgcctcgccgccgcgcgaccaaaccagggcccatcacacaccgccaggcgcgacagcgcgtcgtggacacgcccctactgttgcctggtgccgcgccgccgggtttaccaacccaccgcttgaaccgtggcgggactcgatcccgccgtcgttgtgcggccttccaggcacgaggggcgaaggcggggtcagtgcaggcagcgtggaggggcagcaggacaggcggaagccgctagaagccgcaaaaaagaggcgaaggagcacccgaacggcgcgggtaaaagttagcacttgttggtctcgatccaacgacctttgggttatgagcccaacacgcttcctctgcgccaaagtgctagctcaatttcacacatccccaacgacacacaaaaacgcgccccagcaaaccacacacaaaccaacgcaaacgcccgcgcgcgagctctccagaccgacaattgatgcccccaacgagcttatcgttcacgagatatctcccaccaaacctaggtacacgtacccgcggcacaacaaactgccactgcgcacaggcgcctcgccgccgcgcgaccaaaccagggcccatcacacaccgccaggcgcgacagcgcgtcgtggacacgcccctactgttgcctggtgccgcgccgccgggtttaccaacccaccgcttgaaccgtggcgggactcgatcccgccgtcgttgtgcggcctgccaggcacgaggggcgaaggcggggtcagtgcaggcagcgtggaggggcagcaggacaggcggaagctgctagaagccgcaaaaaagaggcgaaggagcacccgaacggcgcgggtaaaagttagcacttgttggtctcgatccaacgacctttgggttatgagcccaacacgcttcctctgcgccaaagtgctagctcaatttcactcatccccaacgacacacaaaaacgcgccccagcaaaccacacacaaaccaacgcaaacgcccgcgcgcgagctctccagaccgacaattgatgcccccaacgagcttatcgttcacgagatatctcccaccaaacctaggtacacgtacccgcggcacaacaaactgccactgcgcacaggcgcctcgccgccgcgcgaccaaaccagggcccatcacacaccgccaggcgcgacagcgcgtcgtggacacgcccctactgttgcctggtgccgcgccgccgggtttaccaacccaccgcttgaaccgtggcgggactcgatcccgccgtcgttgtgcggcctgccaggcacgaggggcgaaggcggggtcagtgcaggcagcgtggaggggcagcaggacaggcggaagctgctagaagccgcaacaaagaggcgagggagcacccgaacggcgcgggtaaaagttagcacttgttggtctcgatccaacgacctttgggttatgagcccaacacgcttcctctgcgccaaagtgctagctcaatttcacacatccccaacgacacacaaaaacgcgccccagcaaaccacacacaaaccaacgcaaacgcccgcgcgcgagctctccagaccgacaattgatgcccccaacgagcttatcgttcacgagatatctcccaccaaacctaggtacacgtacccgcggcacaacaaactgccactgcgcacaggcgcctcgccgccgcgcgaccaaaccagggcccatcacacaccgccaggcgcgacagcgcgtcgtggacacgcccctactgttgcctggtgccgcgccgccgggtttaccaacccaccgcttgaaccgtggcgggactcgatcccgccgtcgttgtgcggcctgccaggcacgaggggcgaaggcggggtcagtgcaggcagcgtggaggggcagcaggacaggcggaagctgctagaagccgcaaaaaagaggcgaaggagcacccgaacggcgcgggtaaaagttagcacttgttggtctcgatccaacgacctttgggttatgagcccaacacgcttcctctgcgccaaagtgctagctcaatttcacacatccccaacgacacacaaaaacgcgccccagcaaaccacacacaaaccaacgcaaacgcccgcgcgcgagctctccagaccgacaattgatgcccccaacgagcttatcgttcacgagatatctcccaccaaacctaggtacacgtacccgcggcacaacaaactgccactgcgcacaggcgcctcgccgccgcgcgaccaaaccagggcccatcacacaccgccaggcgcgacagcgcgtcgtggacacgcccctactgttgcctggtgccgcgccgccgggtttaccaacccaccgcttgaaccgtggcgggactcgatcccgccgtcgttgtgcggcctgccaggcacgaggggcgaaggcggggtcagtgcaggcagcgtggaggggcagcaggacaggcggaagctgctagaagccgcaaaaaagaggcgaaggagcacccgaacggcgcgggtaaaagttagcacttgttggtctcgatccaacgacctttgggttatgagcccaacacgcttcctctgcgccaaagtgctagctcaatttcacacatccccaacgacacacaaaaacgcgccccagcaaaccacacacaaaccaacgcaaacgcccgcgcgcgagctctccagaccgacaattgatgcccccaacgagcttatcgttcacgagatatctcccaccaaacctaggtacacgtacccgcggcacaacaaactgccactgcgcacaggcgcctcgccgccgcgcgaccaaaccagggcccatcacacaccgccaggcgcgacagcgcgtcgtggacacgcccctactgttgcctggtgccgcgccgccgggtttaccaacccaccgcttgaaccgtggcgggactcgatcccgccgtcgttgtgcggcctgccaggcacgaggggcgaaggcggggtcagtgcaggcagcgtggaggggcagcaggacaggcggaagccgctagaagccgcaaaaaagaggcgaaggagcacccgaacggcgcgggtaaaagttagcacttgttggtctcgatccaacgacctttgggttatgagcccaacacgcttcctctgcgccaaagtgctagctcaatttcacacatccccaacgacacacaaaaacgcgccccagcaaaccacacacaaaccaacgcaaacgcccgcgcgcgagctctccagaccgacaattgatgcccccaacgagcttatcgttcacgagatatctcccaccaaacctaggtacacgtacccgcggcacaacaaactgccactgcgcacaggcgcctcgccgccgcgcgaccaaaccagggcccatcacacaccgccaggcgcgacagcgcgtcgtggacacgcccctactgttgcctggtgccgcgccgccgggtttaccaacccaccgcttgaaccgtggcgggactcgatcccgccgtcgttgtgcggcctgccaggcacgaggggcgaaggcggggtcagtgcaggcagcgtggaggggcagcaggacaggcggaagccgctagaagccgcaacaaagaggcgaaggagcacccgaacggcgcgggtaaaagttagcacttgttggtctcgatccaacgacctttgggttatgagcccaacacgcttcctctgcgccaaagtgctagctcaatttcacacatccccaacgacacacaaaaacgcgccccagcaaaccacacacaaaccaacgcaaacgcccgcgcgcgagctctccagaccgacaattgatgcccccaacgagcttatcgttcacgagatatctcccaccaaacctaggtacacgtacccgcggcacaacaaactgccactgcgcacaggcgcctcgccgccgcgcgaccaaaccagggcccatcacacaccgccaggcgcgacagcgcgtcgtggacacgcccctactgttgcctggtgccgcgccgccgggtttaccaacccaccgcttgaaccgtggcgggactcgatcccgccgtcgttgtgcggcctgccaggcacgaggggcgaaggcggggtcagtgcaggcagcgtggaggggcagcaggacaggcggaagctgctagaagccgcaacaaagaggcgaaggagcacccgaacggcgcgggtaaaagttagcacttgttggtctcgatccaacgacctttgggttatgagcccaacacgcttcctctgcgccaaagtgctagctcaatttcacacatccccaacgacacacaaaaacgcaccccagcaaaccacacacaaaccaacgcaaacgcccgcgcgcgagctctccagaggggatcctnnnnnnnnnnnnnnnnnnnnnnnnnnnnnnnnnnnnnnnnnnnnnnnnnnnnnnnnnnnnnnnnnnnnnnnnnnnnnnnnnnnnnnnnnnnnnnnnnnnntacccgcggcacaacaaactgccactgcgcacaggcgcctcgccgccgcgcgaccaaaccagggcccatcacacaccgccaggcgcgacagcgcgtcgtggacacgcccctactgttgcctggtgccgcgccgccgggtttaccaacccaccgcttgaaccgtggcgggactcgatcccgccgtcgttgtgcggcctgccaggcacgaggggcgaaggcggggtcagtgcaggcagcgtggaggggcagcaggacaggcggaagctgctagaagccgcaaaaaagaggcgaaggagcacccgaacggcgcgggtaaaagttagcacttgttggtctcgatccaacgacctttgggttatgagcccaacacgcttcctctgcgccaaagtgctagctcaatttcacacatccccaacgacacacaaaaacgcgccccagcaaaccacacacaaaccaacgcaaacgcccgcgcgcgagctctccagaccgacaattgatgcccccaacgagcttatcgttcacgagatatctcccaccaaacctaggtacacgtacccgcggcacaacaaactgccactgcgcacaggcgcctcgccgccgcgcgaccaaaccagggcccatcacacaccgccaggcgcgacagcgcgtcgtggacacgcccctactgttgcctggtgccgcgccgccgggtttaccaacccaccgcttgaaccgtggcgggactcgatcccgccgtcgttgtgcggcctgccaggcacgaggggcgaaggcggggtcagtgcaggcagcgtggaggggcagcaggacaggcggaagctgctagaagccgcaaaaaagaggcgaaggagcacccgaacggcgcgggtaaaagttagcacttgttggtctcgatccaacgacctttgggttatgagcccaacacgcttcctctgcgccaaagtgctagctcaatttcacacatccccaacgacacacaaaaacgcgccccagcaaaccacacacaaaccaacgcaaacgcccgcgcgcgagctctccagaccgacaattgatgcccccaacgagcttatcgttcacgagatatctcccaccaaacctaggtacacgtacccgcggcacaacaaactgccactgcgcacaggcgcctcgccgccacgcgaccaaaccagggcccatcacacaccgccaggcgcgacagcgcgtcgtggacacgcccctactgttgcctggtgccgcgccgccgggtttaccaacccaccgcttgaaccgtggcgggactcgatcccgccgtcgttgtgcggcctgccaggcacgaggggcgaaggcggggtcagtgcaggcagcgtggaggggcagcaggacaggcggaagctgctagaagccgcaaaaaagaggcgaaggagcacccgaacggcgcgggtaaaagttagcacttgttggtctcgatccatcgacctttgggttatgagcccaacacgcttcctctgcgccaaagtgctagctcaatttcacacatccccaacgacacacaaaaacgcgccccagcaaaccacacacaaaccaacgcaaacgcccgcgcgcgagctctccagaccgacaattgatgcccccaacgagcttatcgttcacgagatatctcccaccaaacctaggtacacgtacccgcggcacaacaaactgccactgcgcacaggcgcctcgccgccgcgcgaccaaaccagggcccatcacacaccgccaggcgcgacagcgcgtcgtggacacgcccctactgttgcctggtgccgcgccgccgggtttaccaacccaccgcttgaaccgtggcgggactcgatcccgccgtcgttgtgcggcctgccaggcacgaggggcgaaggcggggtcagtgcaggcagcgtggaggggcagcaggacaggcggaagctgctagaagccgcaaaaaagaggcgaaggagcacccgaacggcgcgggtaaaagttagcacttgttggtctcgatccaacgacctttgggttatgagcccaacacgcttcctctgcgccaaagtgctagctcaatttcacacatccccaacgacacacaaaaacgcgccccagcaaaccacacacaaaccaacgcaaacgcccccgcgcgacctctccagaccgacaattgatgcccccaacgagcttatcgttcacgagatatctcccaccaaacctaggtacacgtacccgcggcacaacaaactgccactgcgcacaggcgcctcgccgccgcgcgaccaaaccagggcccatcacacaccgccaggcgcgacagcgcgtcgtggacacgcccctactgttgcctggtgccgcgccgccgggtttaccaacccaccgcttgaaccgtggcgggactcgatcccgccgtcgttgtgcggcctgccaggcacgaggggcgaaggcggggtcagtgcaggcagcgtggaggggcagcaggacaggcggaagctgctagaagccgcaacaaagaggcgagggagcacccgaacggcgcgggtaaaagttagcacttgttggtctcgatccaacgacctttgggttatgagcccaacacgcttcctctgcgccaaagtgctagctcaatttcacacatccccaacgacacacaaaaacgcgccccagcaaaccacacacaaaccaacgcaaacgcccccgcgcgacctctccagaccgacaattgggggatcctnnnnnnnnnnnnnnnnnnnnnnnnnnnnnnnnnnnnnnnnnnnnnnnnnnnnnnnnnnnnnnnnnnnnnnnnnnnnnnnnnnnnnnnnnnnnnnnnnnnnnnnnnnnnnnnnnnnnnnnnnnnnnnnnnnnnnnnnnnnnnnnnnnnnnnnnnnnnnnnnnnnnnnnnnnnnnnnnnnnnnnnnnnnnnnnnnnnnnnnnnnnnnnnnnnnnnnnnnnnnnnnnnnnnnnnnnnnnnnnnnnnnnnnnnnnnnnnnnnnnnnnnnnnnnnnnnnnnnnnnnnnnnnnnnnnnnnnnnnnnnnnnnnnnnnnnnnnnnnnnnnnnnnnnnnnnnnnnnnnnnnnnnnnnnnnnnnnnnnnnnnnnnnnnnnnnnnnnnnnnnnnnnnnnnnnnnnnnnnnnnnnnnnnnnnnnnnnnnnnnnnnnnnnnnnnnnnnnnnnnnnnnnnnnnnnnnnnnnnnnnnnnnnnnnnnnnnnnnnnnnnnnnnnnnnnnnnnnnnnnnnnnnnnnnnnnnnnnnnnnnnnnnnnnnnnnnnnnnnnnnnnnnnnnnnnnnnnnnnnnnnnnnnnnnnnnnnnnnnnnnnnnnnnnnnnnnnnnnnnnnnnnnnnnnnnnnnnnnnnnnnnnnnnnnnnnnnnnnnnnnnnnnnnnnnnnnnnnnnnnnnnnnnnnnnnnnnnnnnnnnnnnnnnnnnnnnnnnnnnnnnnnnnnnnnnnnnnnnnnnnnnnnnnnnnnnnnnnnnnnnnnnnnnnnnnnnnnnnnnnnnnnnnnnnnnnnnnnnnnnnnnnnnnnnnnnnnnnnnnnnnnnnnnnnnnnnnnnnnnnnnnnnnnnnnnnnnnnnnnnnnnnnnnnnnnnnnnnnnnnnnnnnnnnnnnnnnnnnnnnnnnnnnnnnnnnnnnnnnnnnnnnnnnnnnnnnnnnnnnnnnnnnnnnnnnnnnnnnnnnnnnnnnnnnnnnnnnnnnnnnnnnnnnnnnnnnnnnnnnnnnnnnnnnnnnnnnnnnnnnnnnnnnnnnnnnnnnnnnnnnnnnnnnnnnnnnnnnnnnnnnnnnnnnnnnnnnnnnnnnnnnnnnnnnnnnnnnnnnnnnnnnnnnnnnnnnnnnnnnnnnnnnnnnnnnnnnnnnnnnnnnnnnnnnnnnnnnnnnnnnnnnnnnnnnnnnnnnnnnnnnnnnnnnnnnnnnnnnnnnnnnnnnnnnnnnnnnnnnnnnnnnnnnnnnnnnnnnnnnnnnnnnnnnnnnnnnnnnnnnnnnnnnnnnnnnnnnnnnnnnnnnnnnnnnnnnnnnnnnnnnnnnnnnnnnnnnnnnnnnnnnnnnnnnnnnnnnnnnnnnnnnnnnnnnnnnnnnnnnnnnnnnnnnnnnnnnnnnnnnnnnnnnnnnnnnnnnnnnnnnnnnnnnnnnnnnnnnnnnnnnnnnnnnnnnnnnnnnnnnnnnnnnnnnnnnnnnnnnnnnnnnnnnnnnnnnnnnnnnnnnnnnnnnnnnnnnnnnnnnnnnnnnnnnnnnnnnnnnnnnnnnnnnnnnnnnnnnnnnnnnnnnnnnnnnnnnnnnnnnnnnnnnnnnnnnnnnnnnnnnnnnnnnnnnnnnnnnnnnnnnnnnnnnnnnnnnnnnnnnnnnnnnnnnnnnnnnnnnnnnnnnnnnnnnnnnnnnnnnnnnnnnnnnnnnnnnnnnnnnnnnnnnnnnnnnnnnnnnnnnnnnnnnnnnnnnnnnnnnnnnnnnnnnnnnnnnnnnnnnnnnnnnnnnnnnnnnnnnnnnnnnnnnnnnnnnnnnnnnnnnnnnnnnnnnnnnnnnnnnnnnnnnnnnnnnnnnnnnnnnnnnnnnnnnnnnnnnnnnnnnnnnnnnnnnnnnnnnnnnnnnnnnnnnnnnnnnnnnnnnnnnnnnnnnnnnnnnnnnnnnnnnnnnnnnnnnnnnnnnnnnnnnnnnnnnnnnnnnnnnnnnnnnnnnnnnnnnnnnnnnnnnnnnnnnnnnnnnnnnnnnnnnnnnnnnnnnnnnnnnnnnnnnnnnnnnnnnnnnnnnnnnnnnnnnnnnnnnnnnnnnnnnnnnnnnnnnnnnnnnnnnnnnnnnnnnnnnnnnnnnnnnnnnnnnnnnnnnnnnnnnnnnnnnnnnnnnnnnnnnnnnnnnnnnnnnnnnnnnnnnnnnnnnnnnnnnnnnnnnnnnnnnnnnnnnnnnnnnnnnnnnnnnnnnnnnnnnnnnnnnnnnnnnnnnnnnnnnnnnnnnnnnnnnnnnnnnnnnnnnnnnnnnnnnnnnnnnnnnnnnnnnnnnnnnnnnnnnnnnnnnnnnnnnnnnnnnnnnnnnnnnnnnnnnnnnnnnnnnnnnnnnnnnnnnnnnnnnnnnnnnnnnnnnnnnnnnnnnnnnnnnnnnnnnnnnnnnnnnnnnnnnnnnnnnnnnnnnnnnnnnnnnnnnnnnnnnnnnnnnnnnnnnnnnnnnnnnnnnnnnnnnnnnnnnnnnnnnnnnnnnnnnnnnnnnnnnnnnnnnnnnnnnnnnnnnnnnnnnnnnnnnnnnnnnnnnnnnnnnnnnnnnnnnnnnnnnnnnnnnnnnnnnnnnnnnnnnnnnnnnnnnnnnnnnnnnnnnnnnnnnnnnnnnnnnnnnnnnnnnnnnnnnnnnnnnnnnnnnnnnnnnnnnnnnnnnnnnnnnnnnnnnnnnnnnnnnnnnnnnnnnnnnnnnnnnnnnnnnnnnnnnnnnnnnnnnnnnnnnnnnnnnnnnnnnnnnnnnnnnnnnnnnnnnnnnnnnnnnnnnnnnnnnnnnnnnnnnnnnnnnnnnnnnnnnnnnnnnnnnnnnnnnnnnnnnnnnnnnnnnnnnnnnnnnnnnnnnnnnnnnnnnnnnnnnnnnnnnnnnnnnnnnnnnnnnnnnnnnnnnnnnnnnnnnnnnnnnnnnnnnnnnnnnnnnnnnnnnnnnnnnnnnnnnnnnnnnnnnnnnnnnnnnnnnnnnnnnnnnnnnnnnnnnnnnnnnnnnnnnnnnnnnnnnnnnnnnnnnnnnnnnnnnnnnnnnnnnnnnnnnnnnnnnnnnnnnnnnnnnnnnnnnnnnnnnnnnnnnnnnnnnnnnnnnnnnnnnnnnnnnnnnnnnnnnnnnnnnnnnnnnnnnnnnnnnnnnnnnnnnnnnnnnnnnnnnnnnnnnnnnnnnnnnnnnnnnnnnnnnnnnnnnnnnnnnnnnnnnnnnnnnnnnnnnnnnnnnnnnnnnnnnnnnnnnnnnnnnnnnnnnnnnnnnnnnnnnnnnnnnnnnnnnnnnnnnnnnnnnnnnnnnnnnnnnnnnnnnnnnnnnnnnnnnnnnnnnnnnnnnnnnnnnnnnnnnnnnnnnnnnnnnnnnnnnnnnnnnnnnnnnnnnnnnnnnnnnnnnnnnnnnnnnnnnnnnnnnnnnnnnnnnnnnnnnnnnnnnnnnnnnnnnnnnnnnnnnnnnnnnnnnnnnnnnnnnnnnnnnnnnnnnnnnnnnnnnnnnnnnnnnnnnnnnnnnnnnnnnnnnnnnnnnnnnnnnnnnnnnnnnnnnnnnnnnnnnnnnnnnnnnnnnnnnnnnnnnnnnnnnnnnnnnnnnnnnnnnnnnnnnnnnnnnnnnnnnnnnnnnnnnnnnnnnnnnnnnnnnnnnnnnnnnnnnnnnnnnnnnnnnnnnnnnnnnnnnnnnnnnnnnnnnnnnnnnnnnnnnnnnnnnnnnnnnnnnnnnnnnnnnnnnnnnnnnnnnnnnnnnnnnnnnnnnnnnnnnnnnnnnnnnnnnnnnnnnnnnnnnnnnnnnnnnnnnnnnnnnnnnnnnnnnnnnnnnnnnnnnnnnnnnnnnnnnnnnnnnnnnnnnnnnnnnnnnnnnnnnnnnnnnnnnnnnnnnnnnnnnnnnnnnnnnnnnnnnnnnnnnnnnnnnnnnnnnnnnnnnnnnnnnnnnnnnnnnnnnnnnnnnnnnnnnnnnnnnnnnnnnnnnnnnnnnnnnnnnnnnnnnnnnnnnnnnnnnnnnnnnnnnnnnnnnnnnnnnnnnnnnnnnnnnnnnnnnnnnnnnnnnnnnnnnnnnnnnnnnnnnnnnnnnnnnnnnnnnnnnnnnnnnnnnnnnnnnnnnnnnnnnnnnnnnnnnnnnnnnnnnnnnnnnnnnnnnnnnnnnnnnnnnnnnnnnnnnnnnnnnnnnnnnnnnnnnnnnnnnnnnnnnnnnnnnnnnnnnnnnnnnnnnnnnnnnnnnnnnnnnnnnnnnnnnnnnnnnnnnnnnnnnnnnnnnnnnnnnnnnnnnnnnnnnnnnnnnnnnnnnnnnnnnnnnnnnnnnnnnnnnnnnnnnnnnnnnnnnnnnnnnnnnnnnnnnnnnnnnnnnnnnnnnnnnnnnnnnnnnnnnnnnnnnnnnnnnnnnnnnnnnnnnnnnnnnnnnnnnnnnnnnnnnnnnnnnnnnnnnnnnnnnnnnnnnnnnnnnnnnnnnnnnnnnnnnnnnnnnnnnnnnnnnnnnnnnnnnnnnnnnnnnnnnnnnnnnnnnnnnnnnnnnnnnnnnnnnnnnnnnnnnnnnnnnnnnnnnnnnnnnnnnnnnnnnnnnnnnnnnnnnnnnnnnnnnnnnnnnnnnnnnnnnnnnnnnnnnnnnnnnnnnnnnnnnnnnnnnnnnnnnnnnnnnnnnnnnnnnnnnnnnnnnnnnnnnnnnnnnnnnnnnnnnnnnnnnnnnnnnnnnnnnnnnnnnnnnnnnnnnnnnnnnnnnnnnnnnnnnnnnnnnnnnnnnnnnnnnnnnnnnnnnnnnnnnnnnnnnnnnnnnnnnnnnnnnnnnnnnnnnnnnnnnnnnnnnnnnnnnnnnnnnnnnnnnnnnnnnnnnnnnnnnnnnnnnnnnnnnnnnnnnnnnnnnnnnnnnnnnnnnnnnnnnnnnnnnnnnnnnnnnnnnnnnnnnnnnnnnnnnnnnnnnnnnnnnnnnnnnnnnnnnnnnnnnnnnnnnnnnnnnnnnnnnnnnnnnnnnnnnnnnnnnnnnnnnnnnnnnnnnnnnnnnnnnnnnnnnnnnnnnnnnnnnnnnnnnnnnnnnnnnnnnnnnnnnnnnnnnnnnnnnnnnnnnnnnnnnnnnnnnnnnnnnnnnnnnnnnnnnnnnnnnnnnnnnnnnnnnnnnnnnnnnnnnnnnnnnnnnnnnnnnnnnnnnnnnnnnnnnnnnnnnnnnnnnnnnnnnnnnnnnnnnnnnnnnnnnnnnnnnnnnnnnnnnnnnnnnnnnnnnnnnnnnnnnnnnnnnnnnnnnnnnnnnnnnnnnnnnnnnnnnnnnnnnnnnnnnnnnnnnnnnnnnnnnnnnnnnnnnnnnnnnnnnnnnnnnnnnnnnnnnnnnnnnnnnnnnnnnnnnnnnnnnnnnnnnnnnnnnnnnnnnnnnnnnnnnnnnnnnnnnnnnnnnnnnnnnnnnnnnnnnnnnnnnnnnnnnnnnnnnnnnnnnnnnnnnnnnnnnnnnnnnnnnnnnnnnnnnnnnnnnnnnnnnnnnnnnnnnnnnnnnnnnnnnnnnnnnnnnnnnnnnnnnnnnnnnnnnnnnnnnnnnnnnnnnnnnnnnnnnnnnnnnnnnnnnnnnnnnnnnnnnnnnnnnnnnnnnnnnnnnnnnnnnnnnnnnnnnnnnnnnnnnnnnnnnnnnnnnnnnnnnnnnnnnnnnnnnnnnnnnnnnnnnnnnnnnnnnnnnnnnnnnnnnnnnnnnnnnnnnnnnnnnnnnnnnnnnnnnnnnnnnnnnnnnnnnnnnnnnnnnnnnnnnnnnnnnnnnnnnnnnnnnnnnnnnnnnnnnnnnnnnnnnnnnnnnnnnnnnnnnnnnnnnnnnnnnnnnnnnnnnnnnnnnnnnnnnnnnnnnnnnnnnnnnnnnnnnnnnnnnnnnnnnnnnnnnnnnnnnnnnnnnnnnnnnnnnnnnnnnnnnnnnnnnnnnnnnnnnnnnnnnnnnnnnnnnnnnnnnnnnnnnnnnnnnnnnnnnnnnnnnnnnnnnnnnnnnnnnnnnnnnnnnnnnnnnnnnnnnnnnnnnnnnnnnnnnnnnnnnnnnnnnnnnnnnnnnnnnnnnnnnnnnnnnnnnnnnnnnnnnnnnnnnnnnnnnnnnnnnnnnnnnnnnnnnnnnnnnnnnnnnnnnnnnnnnnnnnnnnnnnnnnnnnnnnnnnnnnnnnnnnnnnnnnnnnnnnnnnnnnnnnnnnnnnnnnnnnnnnnnnnnnnnnnnnnnnnnnnnnnnnnnnnnnnnnnnnnnnnnnnnnnnnnnnnnnnnnnnnnnnnnnnnnnnnnnnnnnnnnnnnnnnnnnnnnnnnnnnnnnnnnnnnnnnnnnnnnnnnnnnnnnnnnnnnnnnnnnnnnnnnnnnnnnnnnnnnnnnnnnnnnnnnnnnnnnnnnnnnnnnnnnnnnnnnnnnnnnnnnnnnnnnnnnnnnnnnnnnnnnnnnnnnnnnnnnnnnnnnnnnnnnnnnnnnnnnnnnnnnnnnnnnnnnnnnnnnnnnnnnnnnnnnnnnnnnnnnnnnnnnnnnnnnnnnnnnnnnnnnnnnnnnnnnnnnnnnnnnnnnnnnnnnnnnnnnnnnnnnnnnnnnnnnnnnnnnnnnnnnnnnnnnnnnnnnnnnnnnnnnnnnnnnnnnnnnnnnnnnnnnnnnnnnnnnnnnnnnnnnnnnnnnnnnnnnnnnnnnnnnnnnnnnnnnnnnnnnnnnnnnnnnnnnnnnnnnnnnnnnnnnnnnnnnnnnnnnnnnnnnnnnnnnnnnnnnnnnnnnnnnnnnnnnnnnnnnnnnnnnnnnnnnnnnnnnnnnnnnnnnnnnnnnnnnnnnnnnnnnnnnnnnnnnnnnnnnnnnnnnnnnnnnnnnnnnnnnnnnnnnnnnnnnnnnnnnnnnnnnnntggttgcagatcccatgcaaacggcaacttcaacttgaccttctctcagccgatcagaatcaccaaatccggggaaccagccaatcacattgtagcatacagtacaactgtacgccttggcaacaactccacagccgcacgcgcctcgatacggagtcacacaactagactgcgaagtgtccaatcgcaacacccagaaccttgttcgcacttggtatatccgcattcctcgtcgctcgcaagatcaggggcggacgttccccttgagcggcggcttgatcttcgtcgtccgtatcattgccgagctggaccgccaggttgcgcacaactggacgtggggtacccatccgtcagacttgcagcgacaactcgtcgacttcgccgagtagctcggctttctcctcatactcatcttcaacatcttccccacttccttcgtcttgggcatcctcctcatcgaactggacggtgcgcgcctcgtccgccgtcgcgtccgtgatcatcgcattcgccgagtccgccgacggccgagttacttccaaccgtcgctggactcggcgtaacaattcccttgaccattttcacactctcttctcttctcttcttctcaaaccttggttagctggtacctacgaaacacaagcacacccctgttatgggttgggggaccagttgtggtatagcagcacgcacaaaatcgtcagttgtggtaacttggctacaaacacaacaatagccgagctggtcggctttgtcggcctgcgccgggttgcccccgagcggttcggcccaatcgggacagcgggtgtctcgcctctcgccgagacctgccaaccaagatcactcctccggagatccgccgagttcgacggcctctgttcacttaaccctgtgccctccaccaaaggatggacgacggcgcacggagcgcttttacaggtcgccgagagcaaagacttctcgactcagtaatcagcgcccgggacgtacgggaacaccggctcgcagcggtggcgagacttttccttcgcgcttggcgagacacgcacccaacccgggccgaccttaatctcttggcgctgccagccgagtaccctacaagctatgcctctcgggtaccggcagcagacataatccggccccgtgcagggacttaccggaacgtgtacacgtgttgtggacctagaaaattctgctctgttgtttgttatctctgtcgggcgccctgaaggggcgcctccactattcctaagttcctatacaaataccaaatgaaagtgggcggttttggatctcggccgactcttcgctgagctcggtgacgcttgagctcggctggtccggatgaactatccggataattcttcgaactcggctgagccggataaggtgtccggataagctggtgaactcggctgagctcggctaccggtacagtgtaccactccagccgcgcgaaatttggtgtttccttcaccagaagtatctaacagcacgcagaattgttggatcttcgctttgacagcgtgtttggtgccatcagtggctagattcttggagctgcttgccgtttatagcggtatcgtaccccggttgcattgcaactgcatttgggctacgatcaagttgaagcagagcatagtccggtcgccttgatggaatttgtgtcacgaactaatttgaagcacactgttcgcgccattaccagtgagcctaaacttacgtttgcagctccttaccatggtgaagatttcgcgtgagctggatcggcatccttattttttcgaaataaggtgctggtttaactctgtaactattattgtggaaaccgattagattgtttaattagaatataaatcggttggttaagcagatgattaagcttaatcgggtcggatttactaaaaccgacctcctaattatatcgacagcctaagatttgcactctgatttgacagagcagtctgttgtgcctacaacgccatgtggcaagctgatttagctcaggacgactgatttgcatgctaatcagcccaagtgtccgacacccactcggcattcggcggcggatttaatgtaaaaccgacaaacgctaatgctgacgagaaatgacagcgcaaatatatggcttcacaacttgataaatagatagcagtacacgtcgactgctcacagagaagtatttaatgcacgcgatgctattgctcgtcagtaggagcgcgaaacagtcagctcgtggtggtaagtggtcgttccgcgtattgctggcgggtaatgaggcaatccctattttattaacgctacactgatttatacccttaccaatgacatatgcaattataaggatccccgatttagtaccagtcaaatctctcatgaacgctgctttatcagctaatccgctcggacaatctaatcggtttccgcaatacaactattagggggtttcaaagtagcgattttttggacggatcttttgcaaaggatgggtctgatcttttgaccatcgcagcgtcgtatcgcgacgttgttgttcggttttgttatgacctaaggattacgtcttggtcctccaagctgtaggccaacgctcgcaaccggagcaacagcttgaagcctccgctcgtgacccgagcagcagctagcagctgaccaaggcaccgcccgccaacccggcgtctttggcgtcatgttggtgtgcacgcggcgcccggccgcattcttggtgctgtggtgtagcgggatcggccaaaatctggttaaggcctgatcgagcttcccaccagcgcccagacaccgactaacggagggggttccccaacgatccgtgatcggctgaacttgttctcaccttgtgtacccgtcggcgggctggatccgctctctcggggctccgaagatgcagcacttggtgaagatcgagtgtcttggcgtgatgcggggatagtttgtggagcagcgcggtagtcttcgctctgcgtccgagtatacgctccgatcgagggttgttcgctgcgatcggtcggcctggagttgatccaaggcctgtagttgcctttccgggtatgttccttcctttcctgagttgcttgccgcttcctatagcgggatcgaggttgatcgagaggagaaacgatcgccggccaagcactaatatccggtcgatcgaggacttgcacacaagagatagatcactagagtaggtcaagctggccaatgtattaatccagtattaaccgtaccgctagttcactacccaaagtgtcgacactgccgaggccaatgtagttcctggggcttggtgacttgaggggacttgtgctcttcggtgcaaattctgctctgatttatgtttagctggtctctccctactgctaccatcttccttaccctcctacaaccccacgattactggattcttgccccgacttcgtcctccatgtgcgtcccatcctggtcgacccacgatcgaccccgatcggcgatcggcgatccacgctcgatcggcgatcggcgatccacgcccgatcgctgacttatgtggtgtaggaaacaccagatttcgcgcgaccaactcggctggagtggtacactgtaccggtagccgagctcagccgagttcaccagcttatccggacaccttatccggctcagccgagttcgaagaattatccggatagttcatccggaccagccgagctcaagcgtcaccgagctcagcgaagagtcggccgagatccaaaaccgcccactttcatttggtatttgtataggaacttaggaatagtggaggcgccccttcagggcgcccgacagagataacaaacaacagagcagaattttctaggtccacaacacgtgtacacgttccggtaagtccctgcacggggccggattatgtttgctgccggtacccgagaggcatagcttgtagggtactcggctggcagcgccaagagattaaggtcggcccgggttgggtgcgtgtctcgccaagcgcgaaggaaaagtctcgccaccgctgcgagccggtgttcccgtacgtcccgggcgctgattgctgagtcgagaagtctttgctctcggcgacctgtaaaagcgctccgtgcgccgtcgtccatcctttggtggagggcacagggttaagtgaacagaggccgtcgaactcggcggatctccggaggagtgatcttggttggcaggtctcggcgagaggcgagacacccgctgtcccgattgggccgaaccgctcgggggcaacccggcgcaggccgacaaagccgaccagctcggctattgttgtgtttgtagccaagttaccacaactgacgattttgtgcgtgctgctataccacaactggtcccccaacccataacaggggtgtgcttgtgtttcgtaggtaccagctaaccaaggtttgagaagaagagaagagaagagagtgtgaaaatggtcaagggaattgttacgccgagtccagcgacggttggaagtaactcggccgtcggcggactcggcgaatgcgatgatcacggacgcgacggcggacgaggcgcgcaccgtccagttcgatgaggaggatgcccaagacgaaggaagtggggaagatgttgaagatgagtatgaggagaaagccgagctactcggcgaagtcgacgagttgtcgctgcaagtctgacggatgggtaccccacgtccagttgtgcgcaacctggcggtccagctcggcaatgatacggacgacgaagatcaagccgccgctcaaggggaacgtccgcccctgatcttgcgagcgacgaggaatgcggatatgccaagtgcgaacaaggttctgggtgttgcgattggacacttcgcagtctagttgtgtgactccgtatcgaggcgcgtgcggctgtggagttgttgccaaggcgtacggttgtactgtatgctacaatgtgattggctggttccccggatttggtgattctgatcggctgagagaaggtcaagttgaagttgccgtttgcatgggatctgcaaccacaatcgacatttagttttcgcagcctcgacaaaacatgttggagttagaagctaggacttcgtgtactcgttggtaagacacggtaggacagactcctagaagcagttttgcttaactcattctaattcactttcggattttcttcctaaccaacactcgactaccaagcctcgcccgcataatctcagtctgggcaggctcggagaggagatgcgatctcatagcgagtggatgatgatgtttgctccagtggcgatggctcaggcgagatggccggtactggggcctgagctgactcagccggtgaacagtaccgacatcaaccaactggtcgaagacacggtgttgctactcaaggcgatggggttccggtgcacgagccgacccaacagcctgctactcggcgattgggaccccagtcgagcttcacgcgaaatcctcaagtggaagcgccggttgagagcctcgtttggcctcgagcgagggctgtcggaactcggcagactattgcgaaacgactccgaagaccgtcgaacaccccagcaggattcccctgccgaagactcccgaacgcaagagagccgaggtgttccgctcgactgagggtacgccgtattttgaagattcgcatatgaagacgccaacgcgtggcaagcagccgagtggacgctacgctgagttgtttgacgctgcagatgcagccgagctcagcgacagcgacgatggacgcgagtatcagaactcggctgacgagtcggtgaaggacgtcatcaagcaccttagcttcgatgacactgaaagcgatcggacgcagtacttggaggttcgcacccatgcgtccctcgacaagattcctatgttcgaaggcaaacgttaccgaccggatgactctctccagtggctgaagcgattcatctacgagatgaaaggaactcggctggcgcaagacctctggtacgagccattctcgctgaagctggagcgaggcgcgaagagctggtatcgccagctcccgaagaaaacgcaacggaagtggagtctgctgagtgaggcattcgccgactactactgttcgcagtttgacgagtcggcacgagctcgctattactcggctcagcgcaaagacaacgagctggtgtgtgacttcctcattcgtctcaacggatatgcgaagtcggcgaaaatccagtacgaagccggtggagcggacgctgttgaccacgtggaacacttcctgttgcactgcggggatgatgacgtcatggatctgctctatccgcaacagctcgccgacatcaagaaggccgagaagatcatcaaccagaagatcctgggggagcgccggaagaaacagcgcgaccgtttcgtcgaaagccgcagccgagacgccaagcgcaccgattcgccaaggcactcagaagctcggcggagtgagccgcgccgagacgaccggcgagacgaccgccgggaacgacgtagagatgaccgccgagatgaccgacgaagccgacgcgacgatggtcgataacgccgactagcgacagcgctgctggaggacgacccgtacgagctggccgagagacgccaatccaatcggcgatccaacctctacgactcggacagcgatcggagcgacggcagccagctgagctactccgactcgactgtagactcggaagacgattacatcgacaccgggttcaccagcgaccgcgaccgtagatcgggggaccgagggaactcagctgggacagcaaggagtgatcaccgaaggggtcagccgagctcggctgaccgcgccagtcgaggatacgatcggcgtgaccagactgggcggcgcagtgacccccgtgaacgcccatcgtatggaccttgtgctgcctgcggcggtgcgaaccactccgtccactactaccgccgtcgctgcaagttctgcaagcaattgcacgatgtcggtcaatgcgagctgttccagcgctacgagaagctcaccgcatttgtcaagtccaatgttgccaagtccgagttacctgaagacctccaggacctctacacgccgagtgatttgaactcggcggcccgccaacactgactgggttgggcgataccgggctgccacagtcagccgagccggcagtagaggcgaactttgtgtttgcctttgtgggtgaggcaggaaggcccaaggaccaagtagaggacgaagcattggattctgatagcgatggacttgattgtgagctcggcgagagtggagaagaaagccgagcaagattgtgcagtgcagttgtgactcagcgatcgacggaggtggtcacagccaccatagttatgaagctgctccctggggagcgactcgactggtggtcgtcacaaaagtttgaccgccgagttcggatgagatctctcgttatgggagcagtgaacgaccagcgtacgaagatattgctcgacaccggcgcgaatgtgtcggcagtaagcgaaggattcgcgaagcgactgcggttgaagcggttcacacgccagggtcaacagattggcgttcaaggtattgggaaaggcaaagtggcgacgatgtcacgagcgatgatgaaggtgacactcggctgggaggtcacgtatgaatttgaagtatggatcctcgatcaccacgcgggagtcgagttgattctcggtacggacttcatgattccggctgggatccgcctggatctgtacaactcggtggtgaagttaccagatgaagttgtcctacctctcgtgaagtcccagaactcagcggatgaaccgaagggcggccactacatcacagacggcccgaccgaaccggtgaacctcgagagccgagttcccaccgagttcaggctgatgaggaatcaaccgagtgatgaaacacatgacttctgggtacgccggactaaagactgggtaccgaccgtggtactcgaccggcggaaccgagtggttcgagttcgcctgaccaaccttaagccgacttggacgtggtgcccagcacatttcccagtggttgcctgggcgccgcatggggtgttaccgcccgatggttatgtcaggctgcactcggcgaagtacaaagattggcaagtcatggcctacgaagcggctatggataaggatctgctgcaaaaggaacatcagctgcacgtcgagtggctggctcgacagccgtcggccgtggaccgtagaaactaccctgaaccgagaggggtggctacgtggccgtctaccaagaagcgggactcgacgctgacttgcgcccagtaatgggagaagttggccgagtcgaaggagcgagccgagtcagaggccgtcgacagtccacccttgactcagactgagccggtgaactcggctaccgctaccccagcgcctaaggaagtaatgttgagcacggaacctacagccggtaggacctcgttttgcacccatcctaccggcaccaccacgcccccgtttttgctgcgccgcgcacctaccgcacacgcgtctccacgcgctccccgatgccctgttgcctcttcgcagcaaccgctattatgttcgagttccaaagactcgtggtcgaagccggagcggccgctgccaaggctcacgtgcggctttgctggcagtgcggccagtcgtgcgtggcaggctccaggcacaccaccgtcacccacagaccacccatagccacaagctagcacggatcaaggccgatagcggcgctgaaaacgagcgatgacccaggaggcggaggcggggatcgaacccggctggccggcgatcacacaagaagtgatgatcatctacatgacgtcaatcttcaaagtgatgtacgagacgacggacagcacgaagaccaagatgggcgtctcaccggaagagcttgctcgcgccacagtagaacagtgcttcaaggaggccgacctaaacggtgacaacaagctcagctttgaagaatccaagaaggtacgaatgttcgatttgttgcatctcccgtgtgttgctggctaatggtattgtgtgtttgttcgttgtgatctgtagtggtgcacttcaggaatttgaaaaggccacactaattcggagcttgtgaaactaaaatgaatgcattcgttgctgaacggttatcacggtaacggctggtcacgaagcgcccggccaatacacatgtgctgcgagcgagtacgaaggcgagccaccaagcgatttgtctgactggacgatcatcgatgaccccgggcccaagccgccgagtccaaggctcgaagatgaggtcgatgtgagcgacgagccatgtcgtcagacccggaggaagacctgcgcttacgttaccttctggcagccaagtacgaggaagaaacagatggtcgaggcgactcggcgggagactcagccgagttcgagcaccaagcaacgaacttggagctcgaagactatgctcgcgagttggcgttcctgcccgatctgactgaagcggtgtcgacgccactcgactatgaagagccaaacgttcggagctcggcgcacactcggccacagtctactcggctggtggaagtattgaagagccatgaaaagatcatgatctccagtggtaatgccctacctccaccagcatacggcgtagtgtgcgacatcgacgtacaggggcatccgccaatccgccaacgagcccgccgagttccgctgaagcatctcggcaagttgtacgagctgctcaaggcgctgttacgagcacggctaatcgccttctcgaacagcccatgggcatcgcccatcgtgattggcctaaagaagaatgtcggttgtgtatcgtctacaagctggtaaacgcgattacgttgctcatggagtacgccatgccgctagtggacgatctcctcacggagttggaagcgtacctatggttctgctctttggatactgccagcggttctgggcggtcatgatgactcggcgtgcgcgttggatcccggcttttgtttgtgcgcttggccactttgagtggctgcggatgcccttcggattaaagaatgccccaatgatctaccagcgccttattgacaacgctctatggggttacgtacaacccaagggcggctggaaggtgttcgccaagcgtatccaacaagcggaagccgcctcagaagctcagcggaaacgtctcacagccgacttcgactttgaggccagtggccagaccaagtttgaggctgaccaccgagctcaagccgagtttggcccattggaggaattcattaacagcccagaagccgacatgttccggacgggtgaacctgatgaatcgtgccttgcaccggttttcgaccggcgaacgtttgtggactatatctgcttcggtgggaggacgttcgacgattgcttggggacgcttgaccgattgctgcaacgcttcactgaatgccgcatcagtgtcagcttcccgaaaagcatcttcgtccagcctaaagtcgacttcctatcacatggggtgacctcggctggaatccaagtcgaccagaaaaagatactggcaatagctgggttgccattcccgacgacgaagaaggggttgcaggcgttcttagtagcactcaactactatggccggttcatccagaacttggccgtatttggggcagtcctctatcagctgaaggacgaagactttggacccggcggtgacctgacggctgctaaagcagcgttcgccgagttaaagcagaaagtggtcgacgcgcccatactccgccacttcaactcggctgaggacgtccacgttatgctattcgccaatgagtgggctctgagtagcacgctgatgcagctccacgacgggaagctccacccagtgcggttctgcggccgagtcctcaaggataatgaactcggcaaccatcccgccgagaaagaagttctcgccttgctacagctcatcaaggtgtgccacacgttgctcgccgggaagaccatccatgtttacacccgctactcgactctcgaatgggtgtcccagtcgaagtttctctacggcagagcagtcagctttgcggtactgctatcaccgttccacctaaaggtcaagcgggtccgcgaacgggacacggatttcgcccagttgctccaagcgtccatcacaccggcagtgggattggacgagctactaacggctgtcgccccgccgtccaagaactcggctgtggtccgcatggacccagagttgctgcatgcgcatgtgccccgagacttcaaggggcacgtactttcgttcgacggatcggcgaagaccgctaaacacggcgggtttgggagttgttcttggatcctgtggcgttaccagactggagcattgagatcgttgcgagcgcgcacctcccatcgaccagtcgagtacaccggcatgaacaatggcgtgacctcggctattgagcgtggggtgaaggacttaattatcgtgggcgattctcggcttgcgaaccagcaatccatgggggtgatcgcgtgtaagaaggaggcattgcaagtcgagttagcacgccacaagaaattggtcagcaagctgaattcagttcgctacctccacgtagtgcgtctctacaactcggctgctgactccctagcgaccgaagcactggaaaccaaggcaggaaaggtaccggacggaaagccgagttgaagacccagaacaggatctctgaggtcctgtacgtggacacggactcggctgcaaccccggccgagggtgttgagatggctgccgtgacaaggagtcaagtccgccgattccgtttcgaagacgaagcgacagaacacccagtctcgaacccagctacgaatgaggaagccgaacgtaatgactttgaacgagatagccgacctccgcctgctagacagcgggtgacgggagaagccgagttcggtagcgcagcaccaccagcgaactcagctgagctggtagccgagctcagagaagcctgggagcccaacgccatggacatcgatccggtagtggtccaagctgagcgccgcctgcgaatagcaagagctcaagacgaggaacaacgatgggccgacttgaagacctacctgagaggggattatgcgcagctcacacatcgccgagctcacaacgctgggaaagttgccgacgagtttgtgctcagcgaagacgggctattgtaccgacaaggcaaggccagaccacctggcgaactcggcgaactaggcttatcccttcgactggtggttccgacgaccatgatagacgaggtcctgcagaactgccacaactccatcgagggaggccaccaagggattgtgcggacataccacagggtcagagccgactactactgtattggattgtacgcagacgtggtcaaacatgtccaagcgtgcgaagactgcagtaccagtaagagccaaccgcacctgaagggctattcacctggcaacgtagtgtctgagcgaccgttccacgtggtatcgatggacttggtcataccactgccgaagactcggcggggcaacactgcactcttgctgtttcaagaccactttaccgggttcgtgattgctaaggcgatgagcgagactggggcacttgaggtagcgaaggccttcgaagagaacgtgttccggaggtttggagctccatcactggtacgccacgacagagattcccggttcatgagtgaagtgttccagaagttctcggagatgatgcagtccaagtcgagagccacgctgagttaccgaccacaagccaacggtcagcaagaacgctcagtgaagaccatgatccagactgtgcgtgtgtacgtggaagaccctctccaagccgactgggatgacgtagccgagaagctcgtccatgccatcaacaattcgagagactcgactcggcgggagaccccgttctacctggtacacggatgggacgctcggtctacactcaaggcgatgaccgagtcagtcaggctcggcaggggcaactcagctgactcaacgggggcagccgaatggcgcagggaagcaaaccgacagagagaggtggctttaaagcttgcagccgagttccagttgaaggagaagaaacggagagcgaaggaacacaatgacggactcagccgagtcgagcagagagctgtcccagccggagaggaagggacggataccccagcgaactcaaccgagggagcagccgagttgactgaggaaggtgacgagttagccgagtcggggaagtcactattcaaggaaggtgaccaagtttggtttttcatgaaacgagtcagacctggcttgaccatgaagttagcacatcgatggcatgggccattccgagtgaagaagaaggtggaggagtttgcctacgagctcgaactcccggacaagagcggataccgtttctaccctgtcacgtctgaaagcggtcacggcactcggcgagcgaccgacaactaggctagtagccgatttagccgagtcggatcgtctcgactttgacgaggaactccttcctgaagatagctgggagcccgacgaagcaatgaatgaatacgaagtcgaagccatcctggacgacgagttgccgctctctacgagcacctccagaactcagtggaagttcaaggtcaagtgggtcggctatgatgagccaacctgggagccactgtcgaatttgtcgtgtggtggattattgttcgactacttacggcagaagaagcgtgaaaaccgtctgcaaatgatgcaagttgcagatgaggattaaagctattgcaccaaaatgatgaacccgacaactcagtgaagacagcaggctgagttgaggcgaaggaagctactgcgtcaagactgcatacattacatgaattcaccgaagaatgatgggaaaggaagaagagttcggcggctgagccgcacgttacggagacgaaggaccctgtgaatgcgcggcagatgacacgacggtagcagcagccgctgcgaggagaccaatcgaacctccagtgttcgtagctgagccggccgagctatccgctgctcccgcagtctgcacagccgagtccgctgagcttgaagccggaataacagagttgttagccagagggacactcgatcctgcgctcgactcagctggagacccaggcgacgccggaccaaagagggaagccgtgggagaagggccgcacgcgttaggcgacccgatcaacggagacgccgaatccgcatcgccagcggcccagccgagctcaccagcttcacaatgttggaagatgtggattcctgcacggttgaccggagtcggagcaattgacgaaatctggggaggcgcaggctcgtcgaggtccacatcttcatcgacagcatcctcgactaggcgtggatccacaccagcgggagcgaaaaccatgaattccaagttacgcgtccggaagcaggtgttgtacgggtgcgtcgctgggtcgctcaaccaccaagctcgccaaggctcagagtcatccacagactcggcttccgcacaccagtccctgcctgcaggaatccaagcgagattgaccagcggatacaacgggaccgacggctcaaagaagagctccgcatcggcctccggagcagcaagaccgccaagaagcttcatcactgcagtgaacaggtcgtccggcaggatagtcatgaggcttcggagagcatcgcgtcgacgcttgcgagccaacttgtacaacacccacgtgtcatacatctcggctatcacgtgatacgggagccccgtgtgaaaagccggatgtagccccatcagcacactcgactcgaccatccagtgacaccgctcgaacagtgctacgaagaacttggtaggaccctccttgtcacaagccgagttcggagcctccccgcggatcttcacgaacacttctgcgagacgctccatcaaggtcaccgacttcgccgagctcgccaaccggctcttggcgtcgttgaggacttgaggggagaagaagatgggagtcttgggaagcagacgaagaagccgctgatccgggtgatccggatggtagacgtccgcgaacgctttaatcccagcgagagaacagagcgtaaccggcacgctgcccttccccgacgcgtcatccacagtgaccttggccgtttgatggctgaggatagcctcccagcaccgccgagacccgtaatgaacgaagcggatgtcgcgcagctgagccagctggggagtgatccgagcgtctcgaccgaccgcctggcgagctcgagtgcgcagctgagcgagcgaatagcgtaaagctgcaggtaactgagggagaacgtgggcgccagcgtcatgagcggttacgatagaaaccgacagggttgaagctggaccagcagaaataggtgacggcgaaacagccgagctcgatgggatgccagagctcccagccgagttggtagtcgagctggaagcggcagaaacctcagccggaccgacggccgagtccccagtcgaacctcgctgacgcttggacgggcgggggtccttagccgagtccggagacgcagacctcttcgacttctttgaccctgccgacttcgacttgtgtttgtgcttgtgctcgtgcttgtgcttgtgcttgcgactccgcttgcgcttgcccttaccgctctgcttcttggaacttggctgcgagtctgagtcacctgactcgctggacggaacgagaggcgattgacgagcagcgatgtagctctggagcttcccgtgcggaggtgggagcgcagaagctaacgaagcccggcgagatgcgtcagggtcggccgaactaagctcgtcagcagatccagggtcgtcagcctcagactcagagctctcggacacagacaacgggtgtgctgaggttccgggggcattcaatccaagagccgagcccgacgaaccagaggaagagctacgccgagcggaccggaggacgagatagtcaggagtctctaacagatccaagcagtgagcgttcaacactcgggcagtagccgcagtggagcgtaaagggcgacccgatggagaagtcatcccagctgagcttggaggaaccgctggccgggtcgaggccaccgacggagtgctcggcattggagtgactacagtcgacgccacccctggcgggccacgacgactctgggcttgattggcaaaccgggaacgagtacatgccaagagccggtgagcggccgaactcggagaagactgcgaaacccgaggcggaatcgcagcggagctgttaattgtacccgcagccgagactccagccgtcgagctcggcgcaatcacagcatgcgttgtagcaagcgccggatcgggagcagaggaacccggttgtcctccggcgccggcagtcgatgtcaccacagccgcgctcggcacgctggtcgagggaggaacccatcggacacgagtcgggaacggaaccgaggcaggaagcgaaatagcggacggagttgcagcaaggtcagcagatccaggcaacgatacaacagccactccgcttgaaggcgtctgcaccggggaggaagagtaaggcacgagttgcacggacagcacactcatggtcgggccggcgggccccctcggaagctcagcggaaccaggcacttcggtgaactcgaacgagaggtcctcttccagcgagtgaacctcgtcgccggcctccacattcacatagtcgacagtcaacccggctaagttcaagctcgaccggagcgataggtcgcatgcggcgtcagtctcttgggcagccttttcaagctggaccaacgcgtcctcatggccgacctcaccaggaagtggacacgcgtacggctgctcgagtggcttcttgggcttgcgctgagaaccagccgccgtcgctgacttcgggtttgaggagcgaagtaatttttcggtaggtgtcagagtatccagccgagctcggtgaacctggtcgaccgacttgctgcggcgatgacgcgaagcagaaatggacacgggcatagaaaccgcaccagccgacacaggattggcggcagatgatgcgggagactcgcttggaggggccggagcctcagactcagtcagccgagttgattgtccaaggaacgaaccagccgagctcacgggcgctggcggagtagtagcggcgccgtccgctcgcgggtggatggtcaactcgactcgacgagtctctccagccgggatgtccatcacctccgggaaacgttgagccaggatccggcataaccgagcattgagctgcaagtcagcagggctcaacccaggcgcgtccaacccggctgcagctgtagcagccatgtgaggatcgtgcatgggtaaaagacccatgcgagaaatgacacgcttctgccggaggatggcctcacgctggtgtttgatggtagccttggcatcacggagaggctgggcgtctccagaaatgagtagccgagccgactcctgcagttgctcgaagtgcttggtcgagatcccctggagcacagcgtactcagcgtcacgagccgaaagaagctgagtcaaacgctcaatctccgagtcacgttccctgagctgcctgccgagatccttagnnnnnnnnnnnnnnnnnnnnnnnnnnnnnnnnnnnnnnnnnnnnnnnnnnnnnnnnnnnnnnnnnnnnnnnnnnnnnnnnnnnnnnnnnnnnnnnnnnnnnnnnnnnnnnnnnnnnnnnnnnnnnnnnnnnnnnnnnnnnnnnnnnnnnnnnnnnnnnnnnnnnnnnnnnnnnnnnnnnnnnnnnnnnnnnnnnnnnnnnnnnnnnnnnnnnnnnnnnnnnnnnnnnnnnnnnnnnnnnnnnnnnnnnnnnnnnnnnnnnnnnnnnnnnnnnnnnnnnnnnnnnnnnnnnnnnnnnnnnnnnnnnnnnnnnnnnnnnnnnnnnnnnnnnnnnnnnnnnnnnnnnnnnnnnnnnnnnnnnnnnnnnnnnnnnnnnnnnnnnnnnnnnnnnnnnnnnnnnnnnnnnnnnnnnnnnnnnnnnnnnnnnnnnnnnnnnnnnnnnnnnnnnnnnnnnnnnnnnnnnnnnnnnnnnnnnnnnnnnnnnnnnnnnnnnnnnnnnnnnnnnnnnnnnnnnnnnnnnnnnnnnnnnnnnnnnnnnnnnnnnnnnnnnnnnnnnnnnnnnnnnnnnnnnnnnnnnnnnnnnnnnnnnnnnnnnnnnnnnnnnnnnnnnnnnnnnnnnnnnnnnnnnnnnnnnnnnnnnnnnnnnnnnnnnnnnnnnnnnnnnnnnnnnnnnnnnnnnnnnnnnnnnnnnnnnnnnnnnnnnnnnnnnnnnnnnnnnnnnnnnnnnnnnnnnnnnnnnnnnnnnnnnnnnnnnnnnnnnnnnnnnnnnnnnnnnnnnnnnnnnnnnnnnnnnnnnnnnnnnnnnnnnnnnnnnnnnnnnnnnnnnnnnnnnnnnnnnnnnnnnnnnnnnnnnnnnnnnnnnnnnnnnnnnnnnnnnnnnnnnnnnnnnnnnnnnnnnnnnnnnnnnnnnnnnnnnnnnnnnnnnnnnnnnnnnnnnnnnnnnnnnnnnnnnnnnnnnnnnnnnnnnnnnnnnnnnnnnnnnnnnnnnnnnnnnnnnnnnnnnnnnnnnnnnnnnnnnnnnnnnnnnnnnnnnnnnnnnnnnnnnnnnnnnnnnnnnnnnnnnnnnnnnnnnnnnnnnnnnnnnnnnnnnnnnnnnnnnnnnnnnnnnnnnnnnnnnnnnnnnnnnnnnnnnnnnnnnnnnnnnnnnnnnnnnnnnnnnnnnnnnnnnnnnnnnnnnnnnnnnnnnnnnnnnnnnnnnnnnnnnnnnnnnnnnnnnnnnnnnnnnnnnnnnnnnnnnnnnnnnnnnnnnnnnnnnnnnnnnnnnnnnnnnnnnnnnnnnnnnnnnnnnnnnnnnnnnnnnnnnnnnnnnnnnnnnnnnnnnnnnnnnnnnnnnnnnnnnnnnnnnnnnnnnnnnnnnnnnnnnnnnnnnnnnnnnnnnnnnnnnnnnnnnnnnnnnnnnnnnnnnnnnnnnnnnnnnnnnnnnnnnnnnnnnnnnnnnnnnnnnnnnnnnnnnnnnnnnnnnnnnnnnnnnnnnnnnnnnnnnnnnnnnnnnnnnnnnnnnnnnnnnnnnnnnnnnnnnnnnnnnnnnnnnnnnnnnnnnnnnnnnnnnnnnnnnnnnnnnnnnnnnnnnnnnnnnnnnnnnnnnnnnnnnnnnnnnnnnnnnnnnnnnnnnnnnnnnnnnnnnnnnnnnnnnnnnnnnnnnnnnnnnnnnnnnnnnnnnnnnnnnnnnnnnnnnnnnnnnnnnnnnnnnnnnnnnnnnnnnnnnnnnnnnnnnnnnnnnnnnnnnnnnnnnnnnnnnnnnnnnnnnnnnnnnnnnnnnnnnnnnnnnnnnnnnnnnnnnnnnnnnnnnnnnnnnnnnnnnnnnnnnnnnnnnnnnnnnnnnnnnnnnnnnnnnnnnnnnnnnnnnnnnnnnnnnnnnnnnnnnnnnnnnnnnnnnnnnnnnnnnnnnnnnnnnnnnnnnnnnnnnnnnnnnnnnnnnnnnnnnnnnnnnnnnnnnnnnnnnnnnnnnnnnnnnnnnnnnnnnnnnnnnnnnnnnnnnnnnnnnnnnnnnnnnnnnnnnnnnnnnnnnnnnnnnnnnnnnnnnnnnnnnnnnnnnnnnnnnnnnnnnnnnnnnnnnnnnnnnnnnnnnnnnnnnnnnnnnnnnnnnnnnnnnnnnnnnnnnnnnnnnnnnnnnnnnnnnnnnnnnnnnnnnnnnnnnnnnnnnnnnnnnnnnnnnnnnnnnnnnnnnnnnnnnnnnnnnnnnnnnnnnnnnnnnnnnnnnnnnnnnnnnnnnnnnnnnnnnnnnnnnnnnnnnnnnnnnnnnnnnnnnnnnnnnnnnnnnnnnnnnnnnnnnnnnnnnnnnnnnnnnnnnnnnnnnnnnnnnnnnnnnnnnnnnnnnnnnnnnnnnnnnnnnnnnnnnnnnnnnnnnnnnnnnnnnnnnnnnnnnnnnnnnnnnnnnnnnnnnnnnnnnnnnnnnnnnnnnnnnnnnnnnnnnnnnnnnnnnnnnnnnnnnnnnnnnnnnnnnnnnnnnnnnnnnnnnnnnnnnnnnnnnnnnnnnnnnnnnnnnnnnnnnnnnnnnnnnnnnnnnnnnnnnnnnnnnnnnnnnnnnnnnnnnnnnnnnnnnnnnnnnnnnnnnnnnnnnnnnnatctcgtcaagtcggttcagtgtcactagatccccatgatcggcatcctcctcgacgacgacgcccccttcacgttggagtgctgcactggccaggctgtccgcacttccgttccagtctcgtttcacatgtaacagctcgtgatctggccagttccgtagctgatccagcaccttctgcttcaacaatgtcagcttaggtgctttgcagtcaatctcgccccgtacttgtcggaacaccaggttggagtcaccgcagaccactaacctgcctcgatctatgccgtccaggagatcgaaacccaacaacagaccatgatactccgcctcgttaacagtcagcccttcggcatagcccgatcgagccttcaccacactccattcgggtaacttccacaagattgcactgcacgcacccccgcctcgcttgacgcgggcggatccatcgaaacttatcaccagcagctcttcgtccgcacgcaccgtcgggatcggggcttgaatcttgcgccggggttctttcttcggcgcgatcgcgatcaacgcgtcgtccagatccgatcgaggcgtaatactagcggcgatcgcccccaatatctcgtcctctcccttggtgcacttcgtgatctccagtgtccagggcgataggagtgcagcccactgacccaatcggccttgaaggccgggtgatcggaacagccacgccaacgttgagtgtcgggtcaagacccggatcgatcgtccaaccagcatgttatagttcaggtccaggatccgtaacagcgccagcacttctttctccaccacgttgtagttcagttcattcgacttcagcgttcgactggcgaaagtaacgggatgatagatctggtcgtgctcctgcatcaatgcggccgagatcgcccagtcactggcatacacaatcacgaccggagtccgatcgcgatcgaagtgccgcaggatcggtgtcgtcgcgatcttcatcttcagggtcgaaaaggcacgatgagcacggatccagcattcatcggctacaccgacttcaggaacggatggagtccgatcggggttcactgggtccgtatccactaagttcggtacttgacgatccaggatccggcgcagatcggggcgtttcttcagctcggcgaagtccacctcgcgcagttcgtacaggatcgccgcgtagatcgcgtaatcttccaagaaacggctgtaataattgagactacccaaaaacgactgcatcgatctgagcgatccggggaacggcagatcggnnnnnnnnnnnnnnnnnnnnnnnnnnnnnnnnnnnnnnnnnnnnnnnnnnnnnnnnnnnnnnnnnnnnnnnnnnnnnnnnnnnnnnnnnnnnnnnnnnnnnnnnnnnnnnnnnnnnnnnnnnnnnnnnnnnnnnnnnnnnnnnnnnnnnnnnnnnnnnnnnnnnnnnnnnnnnnnnnnnnnnnnnnnnnnnnnnnnnnnnnnnnnnnnnnnnnnnnnnnnnnnnnnnnnnnnnnnnnnnnnnnnnnnnnnnnnnnnnnnnnnnnnnnnnnnnnnnnnnnnnnnnnnnnnnnnnnnnnnnnnnnnnnnnnnnnnnnnnnnnnnnnnnnnnnnnnnnnnnnnnnnnnnnnnnnnnnnnnnnnnnnnnnnnnnnnnnnnnnnnnnnnnnnnnnnnnnnnnnnnnnnnnnnnnnnnnnnnnnnnnnnnnnnnnnnnnnnnnnnnnnnnnnnnnnnnnnnnnnnnnnnnnnnnnnnnnnnnnnnnnnnnnnnnnnnnnnnnnnnnnnnnnnnnnnnnnnnnnnnnnnnnnnnnnnnnnnnnnnnnnnnnnnnnnnnnnnnnnnnnnnnnnnnnnnnnnnnnnnnnnnnnnnnnnnnnnnnnnnnnnnnnnnnnnnnnnnnnnnnnnnnnnnnnnnnnnnnnnnnnnnnnnnnnnnnnnnnnnnnnnnnnnnnnnnnnnnnnnnnnnnnnnnnnnnnnnnnnnnnnnnnnnnnnnnnnnnnnnnnnnnnnnnnnnnnnnnnnnnnnnnnnnnnnnnnnnnnnnnnnnnnnnnnnnnnnnnnnnnnnnnnnnnnnnnnnnnnnnnnnnnnnnnnnnnnnnnnnnnnnnnnnnnnnnnnnnnnnnnnnnnnnnnnnnnnnnnnnnnnnnnnnnnnnnnnnnnnnnnnnnnnnnnnnnnnnnnnnnnnnnnnnnnnnnnnnnnnnnnnnnnnnnnnnnnnnnnnnnnnnnnnnnnnnnnnnnnnnnnnnnnnnnnnnnnnnnnnnnnnnnnnnnnnnnnnnnnnnnnnnnnnnnnnnnnnnnnnnnnnnnnnnnnnnnnnnnnnnnnnnnnnnnnnnnnnnnnnnnnnnnnnnnnnnnnnnnnnnnnnnnnnnnnnnnnnnnnnnnnnnnnnnnnnnnnnnnnnnnnnnnnnnnnnnnnnnnnnnnnnnnnnnnnnnnnnnnnnnnnnnnnnnnnnnnnnnnnnnnnnnnnnnnnnnnnnnnnnnnnnnnnnnnnnnnnnnnnnnnnnnnnnnnnnnnnnnnnnnnnnnnnnnnnnnnnnnnnnnnnnnnnnnnnnnnnnnnnnnnnnnnnnnnnnnnnnnnnnnnnnnnnnnnnnnnnnnnnnnnnnnnnnnnnnnnnnnnnnnnnnnnnnnnnnnnnnnnnnnnnnnnnnnnnnnnnnnnnnnnnnnnnnnnnnnnnnnnnnnnnnnnnnnnnnnnnnnnnnnnnnnnnnnnnnnnnnnnnnnnnnnnnnnnnnnnnnnnnnnnnnnnnnnnnnnnnnnnnnnnnnnnnnnnnnnnnnnnnnnnnnnnnnnnnnnnnnnnnnnnnnnnnnnnnnnnnnnnnnnnnnnnnnnnnnnnnnnnnnnnnnnnnnnnnnnnnnnnnnnnnnnnnnnnnnnnnnnnnnnnnnnnnnnnnnnnnnnnnnnnnnnnnnnnnnnnnnnnnnnnnnnnnnnnnnnnnnnnnnnnnnnnnnnnnnnnnnnnnnnnnnnnnnnnnnnnnnnnnnnnnnnnnnnnnnnnnnnnnnnnnnnnnnnnnnnnnnnnnnnnnnnnnnnnnnnnnnnnnnnnnnnnnnnnnnnnnnnnnnnnnnnnnnnnnnnnnnnnnnnnnnnnnnnnnnnnnnnnnnnnnnnnnnnnnnnnnnnnnnnnnnnnnnnnnnnnnnnnnnnnnnnnnnnnnnnnnnnnnnnnnnnnnnnnnnnnnnnnnnnnnnnnnnnnnnnnnnnnnnnnnnnnnnnnnnnnnnnnnnnnnnnnnnnnnnnnnnnnnnnnnnnnnnnnnnnnnnnnnnnnnnnnnnnnnnnnnnnnnnnnnnnnnnnnnnnnnnnnnnnnnnnnnnnnnnnnnnnnnnnnnnnnnnnnnnnnnnnnnnnnnnnnnnnnnnnnnnnnnnnnnnnnnnnnnnnnnnnnnnnnnnnnnnnnnnnnnnnnnnnnnnnnnnnnnnnnnnnnnnnnnnnnnnnnnnnnnnnnnnnnnnnnnnnnnnnnnnnnnnnnnnnnnnnnnnnnnnnnnnnnnnnnnnnnnnnnnnnnnnnnnnnnnnnnnnnnnnnnnnnnnnnnnnnnnnnnnnnnnnnnnnnnnnnnnnnnnnnnnnnnnnnnnnnnnnnnnnnnnnnnnnnnnnnnnnnnnnnnnnnnnnnnnnnnnnnnnnnnnnnnnnnnnnnnnnnnnnnnnnnnnnnnnnnnnnnnnnnnnnnnnnnnnnnnnnnnnnnnnnnnnnnnnnnnnnnnnnnnnnnnnnnnnnnnnnnnnnnnnnnnnnnnnnnnnnnnnnnnnnnnnnnnnnnnnnnnnnnnnnnnnnnnnnnnnnnnnnnnnnnnnnnnnnnnnnnnnnnnnnnnnnnnnnnnnnnnnnnnnnnnnnnnnnnnnnnnnnnnnnnnnnnnnnnnnnnnnnnnnnnnnnnnnnnnnnnnnnnnnnnnnnnnnnnnnnnnnnnnnnnnnnnnnnnnnnnnnnnnnnnnnnnnnnnnnnnnnnnnnnnnnnnnnnnnnnnnnnnnnnnnnnnnnnnnnnnnnnnnnnnnnnnnnnnnnnnnnnnnnnnnnnnnnnnnnnnnnnnnnnnnnnnnnnnnnnnnnnnnnnnnnnnnnnnnnnnnnnnnnnnnnnnnnnnnnnnnnnnnnnnnnnnnnnnnnnnnnnnnnnnnnnnnnnnnnnnnnnnnnnnnnnnnnnnnnnnnnnnnnnnnnnnnnnnnnnnnnnnnnnnnnnnnnnnnnnnnnnnnnnnnnnnnnnnnnnnnnnnnnnnnnnnnnnnnnnnnnnnnnnnnnnnnnnnnnnnnnnnnnnnnnnnnnnnnnnnnnnnnnnnnnnnnnnnnnnnnnnnnnnnnnnnnnnnnnnnnnnnnnnnnnnnnnnnnnnnnnnnnnnnnnnnnnnnnnnnnnnnnnnnnnnnnnnnnnnnnnnnnnnnnnnnnnnnnnnnnnnnnnnnnnnnnnnnnnnnnnnnnnnnnnnnnnnnnnnnnnnnnnnnnnnnnnnnnnnnnnnnnnnnnnnnnnnnnnnnnnnnnnnnnnnnnnnnnnnnnnnnnnnnnnnnnnnnnnnnnnnnnnnnnnnnnnnnnnnnnnnnnnnnnnnnnnnnnnnnnnnnnnnnnnnnnnnnnnnnnnnnnnnnnnnnnnnnnnnnnnnnnnnnnnnnnnnnnnnnnnnnnnnnnnnnnnnnnnnnnnnnnnnnnnnnnnnnnnnnnnnnnnnnnnnnnnnnnnnnnnnnnnnnnnnnnnnnnnnnnnnnnnnnnnnnnnnnnnnnnnnnnnnnnnnnnnnnnnnnnnnnnnnnnnnnnnnnnnnnnnnnnnnnnnnnnnnnnnnnnnnnnnnnnnnnnnnnnnnnnnnnnnnnnnnnnnnnnnnnnnnnnnnnnnnnnnnnnnnnnnnnnnnnnnnnnnnnnnnnnnnnnnnnnnnnnnnnnnnnnnnnnnnnnnnnnnnnnnnnnnnnnnnnnnnnnnnnnnnnnnnnnnnnnnnnnnnnnnnnnnnnnnnnnnnnnnnnnnnnnnnnnnnnnnnnnnnnnnnnnnnnnnnnnnnnnnnnnnnnnnnnnnnnnnnnnnnnnnnnnnnnnnnnnnnnnnnnnnnnnnnnnnnnnnnnnnnnnnnnnnnnnnnnnnnnnnnnnnnnnnnnnnnnnnnnnnnnnnnnnnnnnnnnnnnnnnnnnnnnnnnnnnnnnnnnnnnnnnnnnnnnnnnnnnnnnnnnnnnnnnnnnnnnnnnnnnnnnnnnnnnnnnnnnnnnnnnnnnnnnnnnnnnnnnnnnnnnnnnnnnnnnnnnnnnnnnnnnnnnnnnnnnnnnnnnnnnnnnnnnnnnnnnnnnnnnnnnnnnnnnnnnnnnnnnnnnnnnnnnnnnnnnnnnnnnnnnnnnnnnnnnnnnnnnnnnnnnnnnnnnnnnnnnnnnnnnnnnnnnnnngatcccccgacctgatcggccgatggcaagtgaggggacacaatttcgcccttctcggcggctttaccaccggaatccacatgatctggcttcccatctggatcgccaacacgatcctcttgcggcttcgcgtcatctaccggtgcacacgcttgatccgtgatcggcgaaggctggaagtccggctccgcctgtttccgctttggagagcattcctcctccgatccggaaggttcccacaccgactcaacaggatccgaccgtgggtctggtggatctccgacgaggacagttgaagcagacgaccccgactcctctgtcacgcgatcatcgtcctgccacggtctgccccctgatctaagagtatcaacgactgccgcccccggatcagggctcattgcctccggttcgcttgttggatcgggtggacccgtcgactgatcgacgatcggggatacctggcgtctctggagaatggctcggggcgctggataaatcggtcgctcgacggcaggtaccggaggtcccgttggcgcctcctggttcgtcggccggtcatatgtcgtggcttgaaaggctagattctgccattccatgtatcgacgagatccgatcgacacatatcctgggatccggggtatccgatctccagccagccacatcccgatccgttcattccgatgcaagacgaggtctttgtcgctgacgttggtaacctggagatatctgatcctgtcgggtcctcggaccacggtcggcacccaacgatgacccatagctattctcgatccgtcactttcattcgtagcggaagctcaatcgaatccccgatcgcgatctgcattccctgatctacacacacgtgtctgacattgtcgttgtacagctgacgccgtccgctaagcaggatcttgacttcgtcggggagacagatagagccgtccgcaagatcgaggcggatccccgctggaaccataaaatccatacccaggatcgcctcatgtcctgatagatcgccaacccagatattgaagaaatacaccagcgatcccaccagcgtaaccttgatcctggtccttccttctgtcatgtacacgctttcgccaatccccacacattcctggctctaactcgtgtcgacatagcaccccaccttacgagcaaaggcggtgtccacgatggacacctcagcgccggtgtctaagagtaagatcgacttcgcattgttgatcttgccagtgatcttggcctgacggaccacttacctggcgaatgatgtttccagtaccctctggactccccagggaggagatcgggcaccacatcgcccgatctgcggtgttcgctgacgcgaggcagacttcgatcgcgatcatgctccgagatctcggtcgtcacttctccaccagctggctcgaaccattcctccggtctgcgttgcttccaatagccccgcgtttctccagactggagatccaagggcacttcggcgtcagaacggctgaagtcgtccgatcgatgtagacttaagaccttggcgcaaatttcgcatgccgatcacatgtattaccgcgtagatcagtccgtccacttactcgatctaccgtgttcttgtccacgaatgcatcgatccagtacctagaacgctcggctcgtaccggattccaacccggggagcgtcatagtttaacatcttctcggcgatcgcgggcagcatgccagcgtgcttcgccgggttgaaccattgacggatttggttgtagaattcctccatcggacacttgcccatctcgtgcagttcaccacatccacggcacacgaacaggcaacgattcgctggatgacctcgcttgccacacttctcgcacgcgaaacgtctccagcaatcgagatcggtgtgtttccgcgatccacagtgtgagcagcggtttgatcgctccgatccgtcaggtgaagatcgcgatcgtggatccgatcgaggtgcgtcatggttgatctgcgcttggttgcctcgatccggcttcgtcgagtcgcaccctgcgttgcgagacttgtcatcggccgacgctgggtaaacgcgacgtagatcaccctccgagtctgacccttccgatcctgtgtccgacccagactcctggctcgcaatctgaaccgcacgcactgcccgcttggttgcagcagctggtgctgaggtcggaactttctgacgatacttcgatccaaaggcggatcgcttctgtctactcttcgcgcgctttcgagcgcgcaggacttcctccagatcttccgcgtccgcaagccggagtagggtgagctgatcggccagttccggatcgcccagcgtctcgataaagtgttcgccatgttctcggcgggccttggaatctccgtccttgatcttcaatcttgcatgcagagccgccacattcagtcgatagaggtactccaacggcgattcctctgatctcttgcgagaatgataatactgccaagcgaccgatactcccacgccacaatactggatatggaaactccggagtagatcgctccacttgttccgcgtcgatcggcccagctggcggtaccagttcttcgccgggcccgtcagtagatcagcgaaggtcaagcacttctcttcgtccgtagcctgatctcgcaggaacgccgatttcaccttgctgatccacgatcgggcgcggtcttcgtcctgatccttgccactgaactccttaagatcggacatcgcggagattcgcacacactggtccaaggaggacccagtggatcccgaggcagcggtggccaccgcagcaggggccgaactcggtagatcaatatcgtccggatcgtattcccactgggagagatcttgatccggtgatccggctgattacatctccacgtcccgcgatccaacgttgtcgtcgaccactggagtaggtgttaccaccgtgacctgttgttccttcagaaatcgagtcatcgcagcctgaaagtaagacgccagtctgccattcgactcatctgatccggtggcactggtggtccgatgggtcgacttgggtttctgcttccgaggtcctgaccgcatgagttcctgacgttgactccgtgatcgcgcgtccaacatcgcagatcctgaagggccgagggacatccgttggggttcagacgacgtatccgatacatgttccgctgcggagacataatgtgacgacgatcggtacccagtggactccactcgcggcgatgacactggagccggcaacactggatctggcaccttcgggtccgtactatccgcgatcatgtcgaccaaaggtctcaacttgtcgaccaatgtctggatcgctgtctggatcttgatcgaaaagatcgtttgcttcaaaggcgccagccacgaagccggcttccttcaacagcccgagcaggttcttcaccgccatcagcttgttatccgtcactcggggggggggggcgaaatcgggcccttcgggtcgtcgatctgctctggccgcacgatcaccatgacaggatcttgacgcaagaagtctcgcagttccttcaagtgatactgacgatccaggtagcctcagaccagtcgagcgccgacggtctgggatcttcgtcgtccaagcctggcgctctcagcttcttgctcacgatctgggccttgtccgcgatcgcgtccaggtagcccggatcgagcctgatcagcgagtagcgaacgcgtatcggtccgatcccgccttagtttgttttgtaagtgaatctcggttcgcaccaagacccaccggggaccccgaagggacctggggaggatgttgaggtttgtctgctagatctgtctccagatcgccctcgattccgtcgacagaagtcctccgagcactctgtcgatccgcggatctcactttgttcagcagcgtcttcgtcgatccgatatccaacgacgcctcttcccctggttctttcttcacttgcgcatcttctacggactcacggtgaaatccggagtccccaagagatccgggcacgcgcaccattgtggtgtagcgggatcggccaaaatctggttaaggcctgatcgagcttcccatcagcgcccagacaccgactaacggagggggttctccaacgatccgtgatcggctgaacttgttctcaccttgtgtacccgtcggcgggctggatctgctctctcggggctccgaagatgcagcacttggtgaagatcgagtgtcttggcgtgatgcggggatagtttgtggagcagcgcggtagtcttcgctctgcgtccgagtatacgctccgatcgagggttgttcgctgcgatcggtcggcctggagttgatccaaggcctgtagttgcctttccgggtatgttccttcctttcctgagttgcttgccgcttcctatagcgggatcgaggttgatcgagaggagaaacgatcgccggccaagcactaatatccggtcgatcgaggacttgcacacaagagatagatcactaaagaaggtcaagctggccaatgtattaatccagtcttaaccgtaccgctagttcactacccacagtgtcgacactgccgaggccaatgtagttcctgggacttggtgacttaaggggacttgtgctcttcggtgcaaattctgctctgatttatgtttagctggtctctccctactgctaccatcttccttaccctcctacaaccccacgattgctggattcttgccccgacttcgtcctccatgtgcgtcccatcctggtcgatccacgatcggccccgatcgacgatcgactccaatcggccctgatcggcgatcgaccccgatcggcgacccacgatcggcgatcggctcccgatccacgatcgaccccgatcgacgatccgcgatcgatctcgaccggcgatccacgatcgacctcgatcggcgatcggcgatccactcccgatcgatgacttatgccggttgccatgcgccgccgatctatcaccttctgtcctcggccatcccagatccgcgggttctgtcgtcgatctggacttgggtcggccccgaatcacgccgcggttcgggcacgatcacccacaatccggcttgccacatgtcctgccttacgcgccggcgtcatcggaccacctgagatctcccgaagaactccttctgatccgtagatccttgctgcctgtctctcgatcgccgatctcccacgcctccagtcgatcggccctgccgcctttctcggagaacaattcttattcagcacttctccacagtgctgctctacgtcggcttcaagcggcgtcttggtgccgctctatggatggcttttggccgtcaccaaaaaataagctcggcaaaaaatcagacgaacgatgagcctttggaggctcatcgtttgtctgatttttggtctgatctttttcaaatcctttgcaaaagatctgtccaaaattcgctactttgaaaccccctattgtgccttgcacgcatttcgccaccctgatttcacggtcaaatcgaaatggcttatcaaataaaaatactgtaaaaataggccagcgcccataaatcgatccttctagagttgctcacaaggctgatcgtgtgcacacacgttcggcaagcaacagatactgtatcggatgtggaaataccaatctaaaacggcatttccagcaatatgggcgtagcggactgagactgagccaacaaatcacagctgatgcatggattaggggtagtcaatgcctgcagcagcaactaatttttttctcactcagacacgacaaatgttttttaccaatcacaagctgagtgcgttgaccaccccattcactgtccgcagcaacagatcctctgggatgctgggaagcgtacgctggaatgcccggagcgccagcaagaggaaggtggtgtcctctgcctccttcaggttgagtgtgagaaggcaatagcgtgttcatcctactgcaatcggcgtcgtaggtgttgatcttagcatgaaaatccagtcggcgtctatccgagttgtagagttgctgaggtcgtgcgtgagcacgaaggaggcccacctgttgttgatggtcaaggtgaggagactgagcgtgttgagttttgttgggggaggcgcttgttgctcggcctgccgatgcgaaagtagggctaagttagctgtagctagcggagcgaactgccgtccgcttactactatcagcgccttccaacacgcagcaattagtggctgaagctttagacacagtcctaggctgcttgctaaggaagactcgagtgtagtatagatacagagctcgtggaagggctcgtgttctctctgtccctcgacatacattgtgcattattacatgatcgcgctggagcaacgcttgctggacaccaaggcatccgactgacacaagtaggcttactagattgaccttccgagtactctgctcgcagcgcaagccccaagggcggagtcttctctcgcgcgacgaccatgctaccgtaccgttggtgctcagatcgtggccgcgccagaaaaaaaagagctgctgctgcggctcgaccggaacgactttttgttccggtcgccgatttttttcctggccaatcacagccccggaaaaaaaatcagacttgctgcggcggaaaaaagtgagctgctgctgcggacattgactacccctattatgtgctcgttttattttaaaacgatctcactttatattaaatcgaggaaacttactatgggagcggacattttcggtgcaaggcacaataaaatcaacgaactgttattctacagtttagaattgcagaagtaatgttttacagtgtaccgtagttcaggtgcaccagcaatgttgccagtatacgctgaactacctcggagctttttgagatttctatatacgtctcgccaggcgaaatgtggatatgccaggtctaacaactctcaaaggccttgcgtgacatatagaccgacaacacaggtttgggtcagagtctctggcagaacggatatgtcagctgaccccaaaaatatggtgaccatttttttcaggccaaaaaatgtgccaaaaaagataattctgcccccccctaaaagccgcacaacaaacagttttgtcagggtatggaatgcacccacgattggtagaaattagatcctaatgttgaagcgcctctccaatctgcagcatcgccatgagcgatgaggaatcgcgcaatggcgacaagcggatctcgcctgccttcctgacagaagtggccaaccaattgtacgaccactaccagcttttcgtctacggtatgcgtctgtaattcgtctctctaactggcatagcatcgtgccccccaaagctccaggcagagagcgagcggtcggccatacgagcatgaccccgagaagggcttcaccatggacattatgatgatgatggacatggagaaggtgaggtctgtttgcttcttgccaggctcaccccatacaaactgactcgtccactgctgacaggtgagcacgctgcgcaacgagttcctgcggaaggtgaagggtctgtccatcgccgagttcgtctacgtcatgatgcgcttcgtgcagagcagcgcccacaccgacgagaactcgcggctgcacgatctatccgagtctcaacttgtcgccaacctgtgcgagctcttcgctcagatcgacatcaatggcgacggctcgatggagtgggaagagttcacctcgttcattgtggacacggggctcactgtcaagagccaccagcccaactccattcagcagtatcaccacgtgcagtgggaagacgcttccaagcacagcacgttcatcgaccacatctactatttcccgtcgaacgatctcgtggctctggtggaaagctgcagtccgtatttcaaaatctacaacgtcaactgcgagctcatccgcactataaagtcccccgaaggattcgtgcagtgcgcggaacatttgcccaaggtgagtgcttttgtaggatttgtttacactcttgctgccttgatgatactcaactaaccgcacaacacgctatgcaccactagtacaaccagtacattgtggcatcttcagacctgcagttccgcttctatgacgacacgacgttaagacttacgaaaagctgccatactccaacttcgcagaattgcctcaaatggtatcccgagtcctcggcgctcttttcagctggagtgagtggcattgtctacgcgtgggatgctgaacgcatggaagaaaaacatcacatgggtggcgaggtgcacgggcgagtgctcactcgatctcacgacgatattgttcttgatcttctcacggtcagttcaactttgctttcagatcctacttgctgttactcaagtagctgacgtgttgtttgtttctcagctgcctaccctcgagtcattagcttccgccagcatggaccgaacgattcgactatgggacgtacacactgggaagcacaagcagcaactcgacggacatgcaaaaggtgtgcggtcacttgcatactcgccggagtaccgttttttggtgtccgcaggttttgattttgatgctctcgtgtggaatccctacgtggaccagctcattctgcgattacacgggcacaacaacagtctgtgtggcgtagaaatcatcccggacacaccgcaaattatcacagctgacgtcgacggggtgtttaaggtctgggatatccgcaactttgcgtgcatgcaaactttcacggccgagaatatgggggatgtcaagaatattgtgtcaattacctccgagaagcggatcgttgcagctggcaaaaaggcaaggacttgctgaagcacttcgtgtgaagtccatcggctaacctgtgtctatgccatactgcattcttttagttggtcaagttcgactacgagaagctggagaatcccgagcttactgacgaccaccccgttttcattgcgctgtataatccgacttctctttcgttcatcactgccgccggaagggatgtcaaagtctgggatgctcgcgttgggaagctgattcgagtgtacaggtaagcaagctgagttggccatcgctgccgtagatcgctccctcacttgtccgccgtgctcgtcgtatttgattgccaagtcaggaatctgagctcgacggacctgacaacgctgtgtctcgattttcgagagcggaagttcatcattggagaccacggtgcgttgctatcgttcagaagttttcctttcacatttgttctcattacttcgcgatccatctgagcaggtggcaacattcaggtcttcgactacctcaacgggtcccacatgaagtcgttcgcatacccagagctgggcaatcgtgcgcacaatgctgaagtaaccaagctgtgttactgcgctgagcacatggcggttatcagcgtgtcgtgggattgctccatcaacattcacgacgaaagagactcggagcgcggtgtgctgcttcgcaggttgatcggcgggcactcgacggacatcacagcgctcagcttctcgtatcacctgtctctcctggcgtcggggtcatccgattgctccctgcaagtttgggactacgagttcgggcgtctcgatgctacgtgcattggtcacgtgagcgggctgttgtgccttcacttcttggaccctttcccgctgctcctgtctagcgacagcaccggcaacctctgcttttgggcaatgcgtccgtcagcccgatataaaggcaagtgcgtatttcgcttccggaaccagcacaatctcttgggaacggcctcggtcaattgcattgacacgcactcgacccggcgcagtgtaccgtcgtccagtgcacacgcgtactcgaacagtggagacgatcgctacgctgacccgttggacttcacgtccttcctgataatcacaggcgatgacaagggctttctgagcgtctggaacgtcttgccactgctcatgcttctggcgaacaacttcgatctcaagccgttggccaaaccggtcgagtgcgccaatgcacagcggaacctgcgcgtggacgccgccagtatggtgcgcaaggctcgcaacacaccggagtgggcagcctacgcccaccgcgacccgctgtcgtccttcttcttctcggcgggcatgccactcgttgccgccgacgccgaagtcgacgaggagacccgatgcgaagacggcgagatgcggcgactacctccagtatcactcgtacgccgctggaaggcgcacggcgacgtcgtgtactcagtgcagatgatcgaggagcccacgagcctcgtgacgtcgtccttcgaccgacgcgtgaagatctggtctctcagcggcgagtgtctgggcgtgttgatgcagggcggactggacccctccagcggcagcaacttgaacccgaccaccggacatcccgacgttcccgtgcatcgaccatggcgcttctccgtggactacgacgcccgcgagcgccgcaaggagacggcagctgcccccgtggtggaagacgtccacactctgctgcgtcaagacgagcgacgggacctcatcgccgagcggcggcgcacgcagctccttgcccaggccgcagccgccgaggccagcgtgatggaggagatctcccgcacgtatctgccgccgctgctgccccgtcgagccggcgccgctgccacggccagcgcagtggccgactcaatctcggcgtcttcactcggggccgacgcggccttcgtggcgctgcaaccgcttcgcaagacgccgcgccgcaagcccgtgaacgcctccaccgccggccgatcggcgctggtgccgagtcctcgccagctccgactgcgcggcggcagcagcaacaataacctccgcctgccatcaccgcgggcgccaagctgagctgatgacggccaggcgctgtctgtccctgccctggcgagcgcatccgcctactgtaacaccatcctgcaaatgccatgcaatgcacttcgacatgcgcgttctattcttttctgcttgggtggggtccataagatctctcctacgccggccaggtctccgttggtgccctcccccagcgcatctcccttttcaccaggtttgagcaatcgacccgggggcgtggcgaatgcatcaccagaactccattgcgctcgtcaacggccagcggagcaaagcccgcgacgccgtgccacgacgccatgcttcggagcgcagagcagcgccatacacctcctgaggatactggatcaaatcaaccggtttagcgcggatccgtgccgatgtcgctgtgtacgcactaactttgtcaatagagagttcaagtagaaagtaaagttatagagaagagtgtgtcccacttaactccgaattatagtctgatcatttccgcagcccatcgtgtcggctcattacagcttttgccgccggaccaagcagccgaagaagcagaccgtcgccggcctcctgctccggacgtctcccgccctcgcacttcccccccccacttcctccttctcttcaccctccaccgcctccacgacgaccatggacgactgcatgcaagccgccgccaacagcggaatgttcgcgctgtgctcggagccgacgctgcgccagatctgcgcgcgcgccaaggccgtgacgtaccccaagaacgccgtcgtgtaccaccagggcgagacgcagacggagatgctgctgctcaaggagggcagcgtcgagagcaccaagatcatcgacggccaggagcacacgctcgacgtgatgaccagcggcgccgtcagcgccaaccacgcgctcgtgcaggaccccgcggccgtgacggtgcggtgcctcacgcccgtgtcgggcttctcgctgcagagctcggcgctggacgaggtgctggaggacaagacggcctcgcgcgaggtcatgcacagcctcagcaaggagatccggcggcaggcctcgctgctgcagacgccgctgttcgagcagcacgccaagcccacgccctacttcgccacgtccgtggccgcctccatcgagtcgttctaccgtagtggcatgaactcgctgctgaacgcgcgcctgacgggtcagcccgtcgccagactcttcccggagatgcacctgcagatccccacgcgtgtcgtgtacatcaacggcttcaagggcatccgccacatgctcgagaagcacgtggacgctgaccagtacgagtacccgcagttggtgcgtctcacggaggccgtgtcgcccggtgtcatcatgacgcccgtcagcagcatgctggaggccttcaacgccggccacatgaacccggagtcgctcgccacgcgatggatccgcggtacggcgccgcgtatgctgcgtgaggtgatcttcggcgtcggcctgaaccagctttcggactacttcgaggagcgtctgtctgtgacggcgagccccgcgctgaacaatgccatcggtagcatggcggctggtgtcgtgtccggttacctgtcgcacgtgccgcacaacctgtccacgatgaagctcatgcacccgcagaagagctacggcgagcacatggacgacttcatccggcgcgcggaggtgcgcgtgcccaacacggtgtccccccgccagcgctacatggcggccacggcgcttgcgttgctgttcccgaagggtctgacggtgcgtacgtcccagatcgtcggctcgttcattatcctcaacggtaccatcaactcgctcaaggaagtcgacttcaacacgatcaagggctacctctcgggctaagtgtcgaagactcggcaatattacaaggtgacattatacggacgcaatgaggatggcgcgcgcttactgcgctgcagcttgccgccgccggcaaggctccggacgggaagcgcgtgcgtgtacagctgagttcaatttgacgcagccagacgaaccacaacaagcgaaagctagcggcgactggactgcgtagagccgaagagaataggacggcatggggaagtagagcagccacagcagcccccgaatgatacaaatatcaaaagagaatacaaaccaacacctctttgctgacgtacgtggatggctacacgtatcctacacgccctgcaaatcttgttaaacgagcgcggccgaatcctcaagcaagcaaagccgccgaccggcaatggactggccaccatgcgcgtgccattgcgttttgcgcgtttgcccctgtagctgctccatttgtgcccagtggcggctgatccctcggcgcgtgaagtcactctgcctgcagcgtggcgtcgacaagtgcgcgtggcggaagcggagtctcggtgggcactggagtctcgcgcacaacgctcgggcgcggcacccggctcagatactggtacgcgcgcaagtgccggaagaaggtcgacgtgaaaaacgcaacgatgcgcgccacctccgtcggcgaaaagggagccgctggccatgaaggcacttcctggtcattgtcgttggtcgcccccacgccgctggcatgccggatcttctcgcggaactggtcgtagacagcttctaccgttgggtatgcgtccggagaagcagaccatgcgggcgtcggtcgtttgaccttggtctcagcctgctcttgcggatccatgctctcattcggtggcaccggctcagcgagcttactcacaggtgagtcggcggcatgctgcagcggctgcgtcgcgaagacgtacacttcgtgcgcgagggtgaggaggccgagagccttgtcgggcggcaggcgcgcgtcgtcccgggcgaagttgagcacgccgaagcaaaagtccacccacacgctggtcctggggttcacggggtagtgctggacgcccaaagcggattccagacgctccactcgctccgtcgttgaccctgccgcgtctaggtgctcgagctgctccagcgagatcagcgtgctcggctttggcgcatcttgaactggatttggctgctcctcagcgacgaccggcgtcggtggcgtcaccacctcggtcgctttgcccattcctgctccagcaccaacaccacaacaacaagatcaaatacgcactcctcaagtcgcgaccgacccttcgcaagacaaactgggccaaaagtatagctcaattcatttctcgacagcatactcgacgagcacgaaagaaaaaaaataacagcccaagagaacgtcggaagctcaggtggaagaactgcagctcaccagctcgctcgtcacaagcactgcgtgtcattcgcgtggactggatctagtgtgagtacaggtccgagacgtcggacgagatggtcaggtcgtccatgatcttgtgcacgaactgctccgggatcggcttctccacgtagtcgtcgctgcctgcgcccgcagggaacgccacgttcatctccgagctcttggacgtgacgaactgcacctcgcggccctcccacgagatgtacacgaggcagccgtccgtcttgtcgatggccacggacggcaccacgcctttgcactgcacctgcacgcccttgcagttgacgatctcgatgctggacacggcgttgtcgaagatgagcttggtcttcttgcacgagtcgaacacgatattcttggccttgccctccagcaggatcgtggcgccctcgcagccgaagatgtacacctgctgcttcatgttgatgccgctcacggtcagcggctcggggccggtctggtactcgatctgccagttgccgttgcgctcttcacacacagcaggcttggtgaccttgacgggcgcggcgggcttcttgatggcagcgggggcggccggcgtggggacgtcgccctcgggcttgtagtccttgcgccaggtctgcatgtccttggtgaccttcttgagtccggccgtcttgccaccgctctggtcgatggacttgatgcccgcgaagacgctgcccatgccgccagcaggcgccgcagccttggcgggggacgccgcagaagcagcagcggcaggcgtgtagctggcgacgtcgccgcccttggggttccacgtgacgcccgtggtgtggtgcgccttgacgtaggccatgagctccgtcagcaggctcttgaaggacgtgacgaaggcgatctggtccgggttggacgtcttgtactgcacgcggatcttgttgccccagaagtccgagccgcccacgtacgactcgatgaagggcttgggcgcgggctcgacgcagagccagccgagcgcctggatgccctcgttcaccatgttctggtggttggcgaactcgctgcggttgtcgcgcagcgcgttgatctccttgatgcaggcctgtaggtccttgaggtgctccgggttgagcgccgccggcttcttgcactggctggccatcagcaggtacgcgcgctgggccgcgaaggccttctccgtcacctccccgagcttgcgcgtgtcgtctccgagcttggtgctcacctccaggaagggcggcaggtactgggccacgtactcgtcgtacgcctcgagctgcggcgacagctccacgggggcggcggcgggcgcagcagcagaggcagcgggcacgggcgcgcccttcacgcccagctgcgcctccacgcgcgccagacgcgcgccgaaggcgtccagcagactctgcagcggcttgatggcctcactcatgcttggtgctctctgggtcgaaggaaggctcgggttttctctaatgatttctctctcgggctcctcccccttccgcttcaacgcatgatacgtagatgaacgcctgcgattggacgcaattccgaccacgatgccacgagcgattggacgaaatacgaccggatagattacggtaatttatgaggaggccgtggtaacgtataacctttgtcggtaatttatggcattgacttgtgacgcatgtgattggtcaaaaataaggctttttaaaggctgttgactgtgaagtgcttctgctggaagttcccacggcaaggggtcctcgagctggaaagcgctcatgatttttgcgtgtacgcctattaaatgcattcctgtagatattaccactacatcatgctggacaaagtgcaattcctcctcagcagcggtacaattgccctcttgtaggtgcggacacgtagatgccgcggctgggcaccatgtccatctcctgctactcacactgccgccccgccctgcgactccgggccagctcgtgctcctcttgctcggcgactggaccacgagctgtgcaagctgtggcgcgtgcatcaacctcacccacaaagccagtgctacagtattccttagttgagtgcaacgaaacgttcgcagtccgcccctgttgtttatcacgggggctgttgaaatgaacagtttacacagggtaggtagctcactacaatattactcttttggttatcctctattcctatgcctactactctagatccgtgctcggtacctggaggcaaaagaggaagtgagctcgtcttcggactgcgtcctcgactcctcactcctcggcctcgtgtcgtcatcgcactatgtatggttggcaggcagctctctgcctgcacaatccagaccacagctggcgatctgaacttctctcgtacttgctaaaacaataataacatgtttgagagggtttgctttcagttgcaaaataactcgactggcagacaggcgaagcctgctgagcggggcgcgctcggcgcgcctcttcattcaacactcccactaagtactagggtaaagtttcagatctcgcactcctagtttctctcttagtttcaggaattgttttgtggggagagctttagtgagaatatccgctgtcatctctgttgtagagcagtaagctatcttgaggcagccaagttcaaccaggtccctcgtaaacaggtagcggatctcgatgtgtttgtttgctttgtgattttcaggatttttcacaatgctgatggcagcgttgctgtcacaccatacctgcactggtaccttttgaggaaaccccatttctcccagcaagtgccacaaccactcactttctttagctccctcacttagtgcgatgagttcagcttcagcagtagagagcgacacgcctccctgcttgctactacaccatgacacactggctccggccatttggattacgtaccctgttacggatttacgttctttaagttgacacgcgaagctcgcgtcagtgtacacttcgtaagtcacgtctctcgtttttccatcgagaaacagaccgtacgttgacgtccctttcgagtatttgagtattcgcctagccgcttcccagtgcgtgcggttgtaacaagacagaaatttgctcaattctctaaccgcgttggcgatgtccggtcgtgtgccacggaccaaatattggagtgatccaacaatacctctgtagtcgtaaggctgcgcagcaatatgctctgcgctcatgttcgtctctggctcgagtacgaggccaggtgctcgcggtgtcatcaccggcgagctatcgaccagtttgtacttcgtgatcagctctgcaatgtacttgcgctgtgagatcatcatcacacgctggttcctattgcgagttacctccaccttgaggatgtagtgaatgtcgccaacgtctttcatcttgaaccgttttgacaactcggctttgagcgcatcaattagtcgcatgttccgcgacatgatcgtcagatcatcgacatagaccacgactatgacgacctgaaccaaacaacaacatgccacgacaattcttctccatgatccgttcatctatctgtcctactatgcattggccaggtttgttgcagttaaaggtgttccatgtgagtggctactccgaatgaccaaacgttgtgcagtggcaatccctgatgtctcattatcgctgctagccacttctaactgtaagttagtccatgtattataatacctgcgtccttagttgcaatgttatgctgccttccgagattctagccacagcaaaacgcattggcggtaacttcacatactgggcattctctacgttggtacgaagtctacagtacagggcaccgatacgtgtaatcccagtaactaggatatccgattgctttactaaggcgtagtaaagtacaaccacgtacccgaagtgcacaacgctgctgaagaagctgtcaaagacgcatatgtttgcataacttcggagcaatacatagtgttcgaacttcgaacttcgaagcaattatattcgtgtcgatatgaaaactacgtagtatgcagactttactatccttctacttgaatcagggcggcgaaacttgatctttactacaatgtcgctctctttgtcctcgctcattataaacagctcgaacgtctgtgtgagctacggcgagctgcgccttgcccaccaacgcgtcgctgtccgtatcctcgccgcagagtttgtacacatgtcgagcagcacgaagcgtggagcgggcttgaggctgctgtcgtcgtcattctgaggctggtgcggacgtgggagtgcaggcctccatcttgacttggtttcctcactcttctcgtttgtagtcactgtagacaacgtcgtagcacatggcgggactggactcgaggttcaagcgaagcagctcgaccccccatgtctccgtccgaggtgctcgtgggcggcgaagcagtaggccaccacccggtcggccgtcggagggggacgcagacctagagagcagcactcgccgatgaagtcgctcatgcagcgaaactctgttggacgccattttcctcctgcgtctgggatccccctatccatatcgataccacagcatgcacaccatcacagcgctggcggtgtccactggctcgggtggcatcaacagcctcgagatgggctccgctgcgcgtaggaacttttgatcacagggtgcgtggtcagtcgggcgcgatgcacggtgggcgtgcctgcgtcctcctcctccttgaaatgcatccgctgtctcgtgtccaacggcgacttttccggtgacaagcccgcggaggccgcgcgcgctttccgtaggtgcgccgccggctgctattgctgctgctgcacctgcatctcccagctcacgctgtggttgccggtaggtggagagggggctcactccatgacgtgctggacagttagggctggaaagctcgacatcaccgaggagctggcatgtcgaggatgcttgccggtgccgtggcagccactgcgctgaggctcggcaactttcgtagtgtcggctcttgcgatcaaaacatggcgaatgtgagccaatcacgagatcatgaaaaaagtaccctctgagcaaatccaagacctgttctgcataagacccatttaaaaatcttccacctagtctaccgcaaggcagcagcatactgccttcgtcgtcatgaacacaggcggcaatctaggtgggagcagacgccaatctgggcgagccattacagtaggccctgtggccacgaaagctattttatctatcggtagagtctactaccgacggcacccgccgtgcgagaagtgggcgaatatttgagatgctgcgctttctcagtcaaaagcgttgatacactgttggattgtgtcgttgtattgggtcgatcaaaatttgttatgagaaatggtggttacgccggagaacaaatctctatactgaagttactatagttggagattgatacatgtaggacttcgtgtaggacttcatctacacgaagcccattgtatggtccaggcccaaggcattattactccctctcgtggtgcgacttcgtcggtgaaactcgagaacatggtgaaatagttggcgcggcaagtgtgcgcgccgcttgtcataagggtgaagttgctaacacatgggaccgatagttttctcggtgtttgtctaacttcgatgtttacttgtgcggttgattaggccgctttccgttcaaaaccgtcaagtgtactacttggcgtttcttgcctggtgcattcacgaaccagacagcaacggccaacaaccacaatgactcatcaagtcccgctgcaacacaacctgattgacgaactcactgctcgactggcgcgcgtcgaagcccacctgggcttaagcgctgattcgaaaggggaggcgcctcagattcaggcctacgacgaggtcatggacgcgttcttgcctcctttccttgacgcgtgcgataaactgggagaccacacgcaccaattgggcgagctactcgagaaggctttttacagcacagcgctcgttcttggtgatggcaagccaaaccaagaaaccgcaattaacgagtccggccacagtcgagagtttgtccgaggtgtaatcttgcatcaacgaggcgaacggtatccgcgacaacggcagtgacttcgccaaccaccagaacatgatctacgaggcactccaagctctcggctggttgtgcgttgatcgcacaccgaagccgtttgttgattcgtttgtcgaaggcctggacttctggggcaacaagatccgcgtgagcttcaaagcttccaaccccgaccatgttaccttcgtggtcaccttggagtgcttgctaacagaactttcggagtacatcaaaatctaccgcctcaccggagtcacgtggaaccccaagggcggcgacgtcgccagctacacgcctgccgctgctgcttctgcggcgtcccccgccaaggctgcggcgcctgctggcggcatgggcagcgtcttcgcgggcatcaagtccatcgaccagagcggtggcaagacggccggactcaagaaggtcaccaaggacatgcagacctggcgcaaggactacaagcccgagggcgacgtccccacgccggccgcccccgctgccatcaagaagcccgccgcgcccgtcaaggtcaccaagcctgctgtgtgtgaagagcgcaacggcaactggcagatcgagtaccagaccggccccgagccgctgaccgtgagcggcatcaacatgaagcagcaggtgtacatcttcggctgcgagggcgccacgatcctgctggagggcaaggccaagaatatcgtgttcgactcgtgcaacaagaccaagctcatcttcgacaacgccgtgtccagcatcgagatcgtcaactgcaagggcgtgcaggtgcagtgcaagggcgtggtgccgtccgtggccatcaagacggacggctgcctcatgtacatctcgtgggagggccgcgaggtgcagttcgtcacgtccaagagctcggagatgaacgtggcgttccctgcgggcgcaagcagagacgactacgtggagaagccgatcccggagcagttcgtgcacaagatcatggacgacctgaccatctcgtccgacgtctcggacctgtcctcgcactaaaaatgctcgttctgaagtggatgttgatccagcaggtacttcttcatccgcgcagtgagcggcaagttgcacagcaagacaaacggttgattacgtttaacggatcccaagcattgtatggccaacatcgctgcggtacaaatgtagtccttgttgaatccccaccgcgctgagtttcgcctcgcgttgccagccatcccagccagcgagcagcagaacgctgaagaccctcctctctgccgatccgatccaagatgcgtgtcatgcaaaccggtggaattgccgcggctatcgcaaagtgaggtgaagagagacgaggcggcacggtacctgcaaaacataatcgtatagtgcatgacacagcatcgctattcacagaataaattagatcggacattatcaagacgtttcatggattacaacccttaattatcagtacagacaggtacaaggatagaagaatgccatcagcacaccaggtgaacacaacttggtgtgcgccaccacccagcaactcgcgctgccattggccaaatcgagccgacacggcgcagggtcagggccgcttgtcgccagaaccccgcagtcattccagcttccgcctcgtccccacgtcaagcaagcgaggaagtccgcagtgcgccgctgactgtggcgtgactcgctcccggacttagcagcgcgcgcgtaacgtccaacgcctgggcgccaacggtccctgccaacatggaaacgggccaccacatgctgctgcgcagccactccaagaagctgctggcggagcccaagtcgctcaagtcgcagacgcagcccaagctgagccagacgctggacgacgacgccatggcctcctcctcctcctcctcgtccagcgacaagctgcacacgttcgagcgcctgcacgccgagggcttcgcctacctggcggacaactcgtacatccgctcgggctaccggctgcactactcggccaaggagtgcttcctctcgctcttcgagctgcacaacgagacgctcaacgtctggacgcatatggtcggctccttcatcttcctcatgctcatgctctacctggcgctctcgggccacgcgctggcgcccgccgccgacacggccgcgctcgcgggcctcactaccccgcaggcctggtgcgccaacggccagccctggatggaggccggccaccacacgcccaggatgctgctggccacaggcgtgaccgagctctgcccgccgcccacgggccgcgtggcccccgccaagtactacgaggtggccagcgtcatcttcgaccacagtctgcaccgcctgcccagtctcgagcgcttccacgcgctcgtggagcagaacgtgggcggcttctcggactcggtgggcgcccagatggagctgctgcgcagtgagctgggcgcgctgtcggcgcggctcggaggacacgtgcgcgacgcccactcggagcaggtgcgctcgctcaagatgcagctggaccagcgcgtcgagtctctgtcgatgttcctgcaggacgtggccagccaggtgggcgccgacctgcccatgaagtacgcgctggaggagctgaacggcgtggcggacagcgttcgcaacggactgcacatcctggcgagcgcggagggcccgcacgacgttccccactggccgatcttcgcgttcatggccagcgccgtcgtctgcctcacgtgcagcgccacgttccacctcatgttcgtgatcagccgaccggcctacatgttcctgtcgcggctggactacgccggcatcacgatcctgatcgccgggtccttctaccccatgatctactactcgttctactgccacccgtggctgcgcaccgcctacctggcgtccatctcgaccatggccgcgctcaccttcactgtggcgctcatgccggtgttcagcacgcccaagttcctcgtggcgcgcacgtgcatcttcctggcgctgggcttcttcggcgtggtcccggtcacgcacctggtgtggcacttcgggctcttcgacccgcacgtgacagtcatgatcgggccgctgctgctcatggggctgctctacacgagcggcgccatcatctacgccaccaagttcccggagcgcttctaccccgggcgcttcgacctgtggttctcgagccaccagctctggcacatttgcgtcgtggccgccgcgctcgtgcacttcgccaacgcgctgcagcagtacgagtggcgctggaacacgcagtgcgaagcatagctaggagcaaggacacaagagctgcattgcagtgaacccccgagatctattggtcgcgttgtcttcattgaccccgctgttagaggaggcgtttgaaagtgagcagcggcggctaaatagggagtgcgtcccattatttttaacgagaaagcttgtgccgtattcgtggtgaggtccggtgtctattaatggccagctaactgggtgttgtgaagtgtcctgctgtgtgctccgattcattcgtccccagtcaacatgagtgtgttcaagcaggaagcctgcactcccgtggtgaagctgcagttggagctgcctgtagcactcgctcacgaaatgcagagcaaagggcgatgctctttcgacgcgcaaggccggtttgccaccttcgagcaggcgttggcaggcgaggcgaagcaatcggcttcacctcgcgagcgcgatattcggcgcgtgaagccatcctatcgatcacccagagactccgaccgctaccctccgtttgcgatcgcggcagcaaaaggagccgtggctgccagactcgcgttggcgactcaagccgcacagctgaactcgtccgccactcgcacaccgtaccgagctccgagcgaccacgacttccgagagcctacgtcgccgatcaaatgggttccgcaggcgaaaggccgagatttccaggccaagtttgtgctgcccagtaaccaggacatccgacgacgcactgctcgagaccaagacggattcttcggcgctgctccaggagaagacgttctgtccctgccgctctcacctccattccgacagcagttgctgcagcaggagcagcttcaactggcgatcaaggcgcaaacctctcgctcgccgccaaaatcgtctccgtcgaagccagaattcacctcgcgggtcacgcacacatcccgcaagagcgccaacaaggcgctgcgcctggagatcatcctagaccaggaagggcttctgcctcagcttcaggagatccggcagcacaggtatcgcgacgaggtaagacccactgcgaggcatcatcagctcgtacagtttctgacgctctcctattgaacgtttgtcaccatttaggctacaaccgccgctccattccttgcaagctttcgtccggcatcaccgctgcagccgatgtccccgagctgaaggggggttgtccctgccattttgtcgctagctgctcagtcgtcccaacctgggtcgataagagacatattcacatcaccaatacacgaacactcaatcaggttttgatcatcgatgaaagcttcaattcgcatgtccagtcgtatgcttaccttagtcgtcagcggagaagtcgaattggcggcggcttgcagcctcgcgaacggcttcaagccctgacagatcgacctttgtgtacacgggtggcggtgatggcggccgctcagagcttccacttgaccttcttctttgaattgaggatctctgcgttgaagtgctttcggaatctacaccacagaggaaacacacaagtcagtcatgacacatgccccccatttgagagcaaatgggtcgctgaatacgcacgggcgtcggagagaaagtcgaactgatcgcgaatcgaaggctttcgattcagtactggtctgtctgcgacctccgtccgttcaaacgcagaggcggcagtgtcaaccggcgggggttgtggatttgggggtggtggagtctcagttaccgccggaggggtagccgtaggtggaggctgaacgcgcttgaacagcttggacagtttccttgatggtggaggctccggcacactaacgctagctccaacaacgctgctcttgcgctcttcgttgtcacttgctttggagctggagctcttggacaacttccttggcgccggtggtcctggttctggtacctcctcaccaacactgctcttgctctcttcgccttcattgaccttcgaactcgagcgcttggacttccgtcttagaaaactcaaccgcggcgaaagctggcggagcagtgtttgctcgctagctctagctccagcctcagcctcagcctcagcctcactgcctttgtcgctatcgttgtcgccgtgtgtagatggtggaggcttggattttcgtcgcaagaagctcagtcgaggtgagaacggacgcgccggcgcatctacctcgagtgcgggtggaacgatagaaatcttgggctcctcagcagccggtactggcggctccagcttctcttcaaggagttcctcaccgcgtgatccttcgggacttggcacttctccctccgccgatagctgcgttggtgcaagcatgcctggatcaaggtccggcggcggataggaggactcagctggtacaaatggggacgttagcgccgccgccggcatttcttcgtcgtcgaatgctgacgaaggctctacagtaggcgctgatgccggtactcgcttgaacaactttgataatcgtagcggggcggggcggacagagtccccccctcttgcgacttggcttccagtgacattcacttcttcaccgccactgtcgctgagcttcagttctgaaagcgggagtggccccggaaacacgctcccccgtcgtggtggctggagcgttggggcttcaatatcgacagactcgacgatgtcaaccggtatttcttcctttacttcctcaacctcctccgctggttgctctggtggaggaggccacgcaccccgaaccggccggaagtagccaacgatcatctcatcactgctttcactcactcgttgcatcgcgtcgccatcgcgtgtaggacccatgtccacttcagcgtcttgcacttcggtcgggaacagctcctttgtagcttcctcttgagccatttgctcaaggttctcaccagaggcggcagacatcaccacttcttcagtggcaacgaaaggaacgcgaattttttctcttttgcgcagagccacgttcaaccgatgcagcaactccaaacgctcctcgtagtgatgcagtgactgcagagcagaaggagggggttcctgcagactggcagcttctttcttaatgtggggctcttctttcgctgacgccttctgctcgttcacttcggcgtggccaaagtaccgctcaacgaggaacgtgttgcgcgcacgagcttcctccgcctggcgactttcgcgtgggatcaaaaaccacagaagctgggccaccagccaaatacccagcactccaaccagccaccaacccactcggcgctcgatggagacgtcgtcaaagttgtccgctgtgaacgcaacaatcgcaagcgctatgggtactgagactttgagcatgagcagcacatagggggcccataagccaaggccgatgtcatcgtcattgtcttgatcagattgaactccttcaggctccggtcgctgtcgaatgcaacacagttccagggcgttttgccggagtttcacaccacaatcggccaacgcgagcaacggcagcaacgggcacgcactggaaaacatgacaaccagcccaagttgcatcacaatctgcgcgtagtccttgtcaggtcccgggtatgtcgacagcgtcgtttcctcttcgcgattcgttctgccgtagctctgctcaccgcgctgaatctcattgaaacgcttggcggcagacagaatcaagacgatgcgtgtgcacagttgtgctgcaaacagcgcgagtatgagtgtctccatctggataaagataccaacgtgcccttcaatttgggcgttgtacgacacatacagaggacggagcgggactacaaactgcgccagaatttccaatccaccaacgctactcagcagcaagagcgttaatccagtaaaagtgttgaagagctgcaacatgaacagcttggcgacaacacaacttcggtacgcgggatggtcgctagaatagcgagggtactcccacctagttaaggcatgcgccacgctagggatgcaggcactattccactgaaccaggaacgcttggcatacacagctagcaaggattgccagtttctctccgtaaacatcaacgagcaccccttgactgagcagcatcgagagtacgatcaatagattggcaattcccagtaccaggacgcatatccatgactctagttgtcgctgaagagaagcaatctcagagcatagcgatggcttctgcacgacggtatggtcggcgtcgaaacggaaattgtccgcattgcggacagtatcgctcgtagcaaccccccactgaagctgataccacacactcctacgctcccacagcttggcgaatccaaagctccaagcaatcaccaatgctcccaacaccagctctgacaacgaaagtgttgctccaatcttgtcgactccttcagataccatcgcattgtcagtgtgactttggtgcggagacgtgaaaaatatccacaacgcggagaccgacgagtgtcctgctggaaacactatcacaatgacagcagcaaacgcaggaataacaattattttcccgtagaacgcaatccacgcgaagtagaagccgatcttctctccgaaataatcccgtacagcatgcagcggctggcggaatggagcagcacgacccaacaagttcagtataggacgctcgtccggccaaaactcccctgggaggtgaaccggccgccagaatgttacccacgccgaagcgagcgccccacgagagttgaaatcaaaccgactggagctgtgaagacaatgcaacgacgacactaggccactggaaatcgcggcgttcgtgttgaattcagcctcgataacatatcgcgtgatacggatgcagtcgactgtccgcagcacgaccgagcgtcggtacgtgtctggtatctcgagtcgattcgggtacttcttgtagataaactgacgctggatgctcggcgagtagctggcgaacgctggagcgggattgcaacaacgaattgtccctttagagacgcgcgatagtcgtgaaagtgcctggatacgagcggaaacgcgcgccaaagactcaccagaaaaccaaacagcttctttcggatgcatggcgttgtcagctaacagcagcttcaacttgtgcttcaccgtattcgcgtcgagcaccttctggtccgcgttcacttccttcttgtcgcgccagaagctccttcctgggtcaatggcgtctgcgaattgcaggcggtacgtctccatatcacacagtgttgccagcagaagattgtcagaagcgaaaatgtgaacgagcaccattttcccgtcgctcgacatgctcatgctcaagtcgaacttgcagatcgctgttagccggcgcagcatcagggtgcgcacaatcgcgccgaagtcactggcagcaactaacacgcgcggggtgcgtatatctgccagcgttcgacctgtccgaatagcccattccctctcaaaagcctcgcgttcagctgccaaacgatctgggtccctcactcgaaccgaggacaggtacatgctcagcgctttatcgtagtcaactggaggcaacgattgctgcaggctgagctctatagctccagtagatatctcgtcccgtgatgacgaaatgcagcacagataattcaacgcattcgtcacagcttggcgaagtgctggtagaataagctgcaccagcagaaccagcttgattcctatcgaccatgccaggtacctatcggtaaagttgaaagacgccgccaagagagccacaaattcatgttggcaggatgaatcaaactctgccggactgttgctggaggatattcccacgcacacatgggagatccaccgcttgatagacgagcaggtttgacccgacatcttcacgtacacgtctcgaagttcttgtacccgtgtctggtcaatctcagcggcgacatcaggcccgatgagcctggcagcaatgttgatgaactctgccagcatgaacacttcagacgcgacggccagcactaacagcacacctgctagctgcttcttccacccacaaccaacaaagagagctgcgatatttgcagataatccagacaggagacccacgatcacaatccacgtgaaaattgcgtgaaaatcgacaatcgagcagaagctcagcagattcgagctcgcgattgcattcgaatagccgaacactgcagtggccaacaccagtagacgagtgaacaacgctgtcgatagcgttgttgatgaagaagcttgcgagtaacttgaagaaggcttcataagagaaggctgtctccgctgttttgttgtcctcctagtggtggatggcccactcacagccagaaacaatcccgtgaagagtacttgaagcactagcagcacaatttcaccgatgataatgggctcagcaatctcgttgactcggatgcacgtccccagcgcagcagcggcacaagacttggcattatcattccacaacggggagaagaactcacgccgatcaatgaccaccgactcgtagctgagcttcgtccctgccgaatcgatgcagtgctctctcaaccaccagatgaagacagcaggcgcatcaaacacgaacctttgcacgagggagggcgtggtgcctccgttgaggatcaaggcgatcgtgttcggcgtgagcgcatcctctctgcttgcaagagcttcgttcaacttgctctgactccttcggatgatggtcagctcatccaatcccaacaccaagccaatgatcatagcaagactaaccaacagcagcagccgagcgccgttgacgctgcatttccaggccgccatccatccagcgacattcaccgccagtagaacccccacgcctgtcacggctgctctcacgagtgacgggggaacgtgatcacgcccgtcgtcgtgcatgtaccacgcgtagagcaccaccaccgccactagcagcaatactgctgacaccacatgaagccgacgtagagcccgcgccacatgcgacgccatgggcgccttctgcttgccctccgcagcctcccgctccgcctccactgctgctgcctgcgccgcgttcctggccgccaccttgtgcaggtactcttcctcgcgctgctcgatggccgccgtcatctccgtgatctcttggagctagaagcacaacacagtcattagtaagcttttggcacacgtcgcagatacaaatgtagccatccaccgaccttgtcctgcgtgacgccgctgctgccgccgagcgggagcgccatcacgtagtagtagcgccacggcttccgcccggccgaggctccatccttgtccttgtccttggtcgccatctcactcacccactcgctcactcactgccagccgctcgatccgaccgccgcagcccttcaggatccgcgggatccatgtcgtgatgtagagctacaccacttaaagcagtacagagatgggtacacgatttccaagcatgacgacgatgctggaggtcaaggtgttgtacttcgcgtcggcgcgagaggagatcggcctgcgcgaggagaagctgcagctccccgtggacggcgacaagaactcggccacgctggcctcgctgcgccgcgttctggtggacaagtacccgcatgcggcggccaccatcgagagcatcacgctggcgcgcaacctcgagtactcggaggacgactcgcccctcgacgacggagacgaagtggcgctgatcccgcccatcagcggaggatgaggaggacgaagcaatacaggcaggcggcccttgaagtgagaatatataaacttgagccagcgacttgagccttgcttgatacagctcctgctctacaactacagacagcactaacgcttctctctgtcttctttacacgcgaccgactcagaagcggttgacgcccactgtgcgctggaaaatgttctccaggtcccgccccatgccgacgctgggcggtgccaccagcagcttggccggcgccttgggggagcgcagccgcgcgagccaccgcagccccttgtacacgcacccgagcgccgccatgctcaccatgaactggaagatgcgcacgcggcgcaaccggctcttctcctcctcctcggtcacaggcggctcgccgtgccgcgggtggccgggcgggaacacgggccgaggcgccagcatggccgcgatgccggcgcacatggcccctatcctctccaagaagtgcacgaagctccctaaacatcacaaacatcaacgagttagcaacaagcacgctctgcaactcatactggaagttgccgcaaagtaccgtaccgatgcagaagttgagcgcctccgcgttcatgccgagcagctccgtgatctgcccgatggagctcacgatctggttgaagctcgcgagccagcccaggccgccgccgttcgggtccatcatgccgcccatggcgccgcccatcatgcccccgtagcccattctcgacatgcccccgtagctgccatagccgcctccatagccgcccatgccgccgtacgagccgatgcccccgtagcctcctccgtaccctccaatgccgccgtaccccgacccgtacgtcgagcccagccccgtgccgtagccagtagtgccgtaacctccagcagcgccgtaccccgtggccccatagcccgtagcagcagcagcagcagcacctgttccgtattgagaggtggtggacgccgcgttcatggctgtggaggcgctggagagcgaagagattcccgctgcaagagacgaagacgcggcggtggcgcctgcggccacgcgggaggccgtcgcagctcccgaagactgcggcgcgacaccagcagacgccaacaagtcgccgcctgaagcagaataataggggataagagagcgtgagagtgatggtcaggtagggcgtactacgtgtagagcgcacctgcttgggcggcggtgctctggcgcttctcccagggcttggcgggcgccgacgaggagctcagtgcgctggccattctgttgccgtttgaccggggttcttgttcaaggctgcgtcgacacagtaccgtgagcgatgagtaggttcgtttaataaagttctagagtgaagaaaatattgacttggtatttgtattcgatgcatggagaagtgcgagtggaatatcaaggatactagatgacagatattgagacaatacgatactttgcagcgaccttcgggtgacatccgcggtattctgaagttgaagtggcgactgacgtgtcaacgttgacacgtgaggaccggcggtcacaaacgaactgggcgtccccgatctgccgtgatgcgacctgctgcatgacaccgaccgtatcctctacgtcgggacgcggagatgctgagcgaacagctctgtgcgtggcattttccgtcgcacagtggttgagtatgctggcgacgtgacgctgctgaatgaagactgctcatgatccggtactgtctaaacgttaagctctcggagcgatcgctgctctgtgtggactgaccccttgtcctgctacttttacagctcagcgtcggagtcaatggggttggctacgcgaccaccgggagctcacaaacgtccaattgaagcaaccccgactcaattaggcaaggcacgctctagatggcactgtgcgttttaccagtttggcaattgacaccggcgccatcaaccgcgtcgtggtcctccatccgccacgaaaatgttcaaacgctccatcatcatcatcaagctaatttgggtcggaaccgtccgttggaacggtggcgtgtgcctctgctcggcgattttccaattccgtgcctgcagtccgagatgcccacgagctccgcgcgttgaccaagccaaaacctcattcttacagccagtcagtcttctattcgacccacgatgagcgacagtgaggaggactcgggcagcgtcggcagacaaaagtccatcttcagtggcatgggcaggtgagcgcgagctgcagtgattgttgatgtgggtgccatggactgagctatgtagttgtcgacttgatacagggtgaagcagatcaaccacctccgagagaagtggagccccaagcccaagtcgccgctaccagaccgagcgttcgtcgaatcgccgccttcatctccgtggagtcgacggcccagcccagacaagtacgcgcaggggccgtatgcaggcgatagtgggcgtcgcactccccacagagggcaatcggtgaacgggtcacccaggcggcaacccgtagtgactgtggtggacatggagagatacctcgcaatcaacacgtggctggaacacaacggcatcaacgttgcgcagatcaacacttcacccgataaacgcgacaattcgaaggagtatggcctgtttgacgacatgtacagctcgctggacgttcttgagaactccctcatgagcgagcttgcctatctcaactacagtaggggcgaggacgttgcggctgcaaaaaatattgaggtatgaagttgggaattcgtacacacccacactgactgaccaaactaacctcgacttcaatgtagcagaagcctagcgatacactgtcgctctcatcgcctgccctgttcgattacctggtcgtcatcgctccggatatggtggatgttacgatccgcaacttctggagcctacgtgaaaatgtgttcgaggcgaccgtcgcatttgcccacccgccagagagccaattccgcgccgagagtctcgagcacttttgctttcccaccggaatcaaagctgtcaatgccaatgccggtaccaacgtggaaaaactttccgaagctcatagtaccagctcttcgttatcctctcaagagggggagttttttgtgttaatgatttctggtggaggcgtccaaggccagagtgttcaatatgcgatgtgcatgaagggaacagtgcaagttcgagatggtagcggcgatgggaaatttctgctactgccgatttgttactgcatgattgctcaaatccccttcattccattctttcgagctgtactacagggacttttgggtaagcgtaaactatatttttggtacaacttgatcaaactgtttatctgatgtagtatgtacttttgccataaaacagataacctgcggaatgaactcgaagcacatggatgcagcgggtctcagtctttaaccagcatcgtaacagataaggtgggaacattttaggttttcagcgtttgcaacgtaaaagctgagatttatgtattaattatttttcagcatgcaggctacatcgacgatactctgcaaaacctaaagtcgatccctcttcccgacaaaggcctttcagtgtctgtcaacgtgttcccatcgccaagtcccgaattgatattgacccgaccacacaaagaaaatgatgcggatgagaaggttgcactgttgttacagtgggcactgccgtcgctgctgtctcgggtctcagttgatcgcctactacagattttgagcctcttgctcgtcgagatgaagtttatcgtcgtctcggatgaaatccctctgctatccgctgcaacgctagggttggcgtcgctgttgcatccactcgggtgggccggaccgctaatcagcgtgctacctccctcaatgcacgagtatatggaggtgcgtctgctacattttcccctcagctttggttcatttataataacctcgactgacctcgactgtgtatttctaaggcccctgtccccctaatctgcggcgttgacgaacttcctcgtgactttgagtgctcgaaaggcacttgcatcctctatctaactgagagtcgagtgcagctgcacatcgaagatgcacgttcatttgaggcactacagatgcctgaagtcgaaaatctctcgtgtgatctcacgagatttaccaaagaaatgctgggtcgcgtgacaggttcgttccgagacaacgtcacgcctttatcgacgcacctggtgattcaccgcgttcgccggcatatcgaacacttgattagtgtatgtgcgaatggaaactctgaactatacgcgaatgaaaggcggtttgtaaatgtgttcatgaagacgcaaatgtaccagaagtacatggacgaccagcctgtggctgccccaactgaccaaagcaaccaccaagtcctgagtgatcagcctgcagtagtcgaagcgccaatgaccctgtcttcggtcaacacccagcatgatggattaaagtcagcagctagtgtgttgttccaaatcgcattggccggagttagcacattaccgcggagcagctcacgaacaagtatcgcatctaaggctgctacagactcggagaccgacgcacaaaatcccgaagtcttggagttaccggtttttgacgaaccggatcctggatcagtgaagctttcgtctgcagcttcgtcgcctacaggtaaactattcttttctttctttaccacgacaaattgcctggcgtatctgcctgtaaatgctgatctgttgtttagctagaatattctccagcttgaagagctcgccaaatgagaaggtggtggaatcaccaattcgaggtcaagagttgctgtccccaacgccgagtgaacaatccctccaagcagatcgacccaaccgaacatttgtctggcctctcagtcagtcggagctagacattttctgggttggcgatgaagcgaacgctatgagccccgctgtgatcagtcccggaagcgccccgagatttgcgctgcattcaccgatgagtgacgtggttgaatccccacgtcgtagcccaaacaatgaaagcgtcggcagctacatcgacggcccgaaaagtgcgagtcgaagtgagcacgggggtgttgtgaatgctcaaagagctgacacggagactacgatctcgatctttgacactgcgatgagtgaagcgctggggagtgcagacaccgtagacgacgcgtggttgtttgatacgtccgacaatcacatcctgagctcacaccacgatgccgacagcgatgacgatcggggaactaaacgcgacagctcagcaggggaatgcggtacgcctccccacaacgacgaaaacgtgaaaaatgaggtactagatcaaaactcctccggaaaccaccctcggggatcatggccccaggagatcaacgaccagaacgaagacagaagacagtaccaagaatcccacgacccaatgttgacaccagatcaagccaaagttctgatcgcagggatttctatcgactcggtaagttcaacacctttacccactttcaaaaccattgtcggttttaccaaccaaagctatgaactacagcgaggcgcatgggaggggtggtgtgaagggaagatgttcgtttctacggacctgtcgactctcacttgggagcgacggaccgtagcattggcagccctgaacatgagcatcgcagacattacgagcgtcgctcttgacaatccaggtgacatcaaacagcgccgtcttcagctgaatttcggcagcgaaagcatccactttcagttctcccactctgtgcagcacgacgaattcttcagcgctttgcagcagcttgttcgcccgactcaagatcgtggagagggacgaagggggcatttatcatcgacatcccccgtacccactccagtaccataccatcatgcatcctctccgcgtaatgacgaccaacacagtgcatcaagtaaccacgaagaggacactactacagttcctacggagcgtgccgtcccttctcaacaggagagcgaagtcgaccagttcaaacggaaactccagcgcgggttccttgttgagaaggtaagacgattcgtattcctgaaatctcgttttccttgaatgtatactacagaatatcttacaaatactttttggcttgttttttgtttgttttactatgctagcatggtcggctcgggaagccacacgcgaaagtccttttcaccgatgcgctctgcacgcacatcatgtggcgaaaaccctcagcaacgggggccaacgatcattacgaccagcttgacgatcagctgcaccaccgttccagcctattttatcacagcaagagcatcccagtcgacagcatcaccgcgatcgtgacggggaagcagacgacagtgttccgtcgagctgctgccaacaagtcgagcgagtgcgtgtgcttgtcgatcctcacgcctacgcggacgctcgatatctgtgcctattcactggagggattccaggagctctatcgcgggttctcttcgctgctagaggaaattaaacgaacacgagacggattagactgaccagtaatgcgttattccctttaatctccctcaaaaccagcgagctcctctcgcatatcgtcgatttgagtcgagatacggggcacctcatctgctgcctttccagcggatgctggagatctggtgactcccttggccacttgcgccgctacagaggattccagagactgcttgttgtttcgagcggcgttagctatcagcaaagcctcaaaccgttccagttctccgaactgcagcaagcacgacaccagcttgcttaacttcgcactgaactgtacacgatcctacaagtccacattttcattggtaagaccaactgcactaacagcaaggcaaagaactcgacgtaccaagagcgattggggatacagtgaaccggaatatgacttgtggcacttccgcattcgagctgacatcttcgctttgatgtcatccagagacagatcaacctccgcttctaccgcaacaaggtggctttcggtctccttcttgagctcgtagagtaaatagtagctacggacacaccaacacgggcaataacgctattagcaaccatgccgctttcaacaagtacaccatgagatccatacctgaacggagaaaccaagtcgaagaattcatcacatccagcctgctctagcctcttgaaggctattacagccccacgaagcgagtccacaacttgctggaaagcgtcgcgctctaacggtaatatgcgttccgacacaaagctccgcggatcctcaatatcgatcggggcagtacaaagatccgggaagtggtcacagagcacagcgatggccgtcactagatccatcttctcggccgcttcgtcgatcacatcagacgactccggcgtcttggcttcttgccagaaatcggcgaaaccgcgccgtacctgagctgcgttgttggcgaagtcgaggacgcggacgctgggcttgtgcttgtggcgacgattcaaacgactgagaagctgcaccgtgtgcgcacttgagcgtaagtagcggtccacgtacatacacgccagcagcggttcgttgtagcccgtatctagcttatcacagacaacgacaatgtcgctgatggccagcgtgacgctccgatcgttcagcgtctgctctgttacgggcttagagtcttcaccgtctaaagccaccgacccactgaaggcagcgtagcaattccagccgagcttcttctttttgacgaacgtggtgattagcgtgtagtagcgcacgacatcctggcgactgcggaccacgatcatgcacttcaccttgggatggtctcgcttcatggcctgaaagtccgtcatcatgaccaaagctttggctttgagtacggcgacgtcgtcacttgcatggtcaataatacgccgccgaacgcctcgagtcgtccgcaacaactcctgaactagcttcggaaacaccgacgtctccacctcgcagctcatacacgtgtagttatcaagcgtattcatgatgcgaccatcctctgtagcttgcgcaatggggtagcagtggaacgggtgtcggaacccgtcgtcagtggaggagccaaacagctcgagcgcatctgtattcggtgttgccgtaaaacctatgaactgcacacacacacaagtcattagctgtgaaggtaaacgaaagagagtgtacagtcgcacaacataccgtaagctgggcctggctgccttcccctgccttcatgaccttctcaatggcgtcgcgcgtagacgacgtgtgcgaacgatgcgcttcgtccgtgatgatggcaacgcgctggaatgcgtcgtccccactctcctcctcatccgccccctcaccagcgccccgcttggcactcgagctgcggtgcagcagcctcgtcagcagcacatcgtctctcacgagcagccccatcttgtgggtcgtggtgataatcacccgctgcggactctgctgctgcttctgcgccgacgcgtccagcagccccgccaggtgctcgatgctctcggcgcggaagacttcgtccacgccgttctgctgcaggtacctctccacggcgtctcctacctgctcgttgagcttgactcggtccagcatgaccaccaccgtgtggaaccgcagggaccgcgcgtccttgacgtacagtagctggtgtgataatgcggcgatagtcagcgtcttgcctgctcccgtgctgtgctgcaataggaaccgctctgccgttgtggacgctgcatcgtcctccactgtccgcgtctggatggcagtgatgacgttctccacggccgtcaactggtgcgtccacggggtgaagaccaccgccctcttggtcccgcgggtcacggagctgcccccgacgcgcatggaggcgacgatgagcgcgtggagcacgctctgcttgtgctctacaactgtcgtttcatggtcgttgtccagtttcgggcgcttggcgtcgcgcgcttcggtgtcggaattggtggaggggtcgtcattgacctgctgctcctgtgcctctgcggcgactgcagcgttggcggctgcgacctcctcgggcgtggggcgagaccactgcgtcttcctggtgagcgtgtggtagtagtagactttgcccttggagcgggacacgcgcacgagccactcgggcggcagcggcgccgtcggcgtcatttagttgcgcgacgatcacgaaataaaatacacacaatataaattacgtccaaaatacccaaaaaaattacgggaaagttacgacgcaggaacgataagccatagacctgggtatgcctactcgcgtgccgcgtgtatggttgcttgcaacacgcttgtactattgcaacagcagccttagcacactggagctccatgctacatgcacctacgaattcgaagacactgtattccatcattgcccaaattacttcccttcaagcagttactcacaatgtcaacgtctcgatgctcgcattcaaaacgaaggacactacaaatgcaaggcacaatacatacaaactcaactgcttgtatcacccgtgatgacttgcctcggaagaatcaacgatatcgattcagcagcttgattcgccaccgagagcttcggataagagcacctcgatacatgtagctggccgaggcaacggtgtcgccgctatcggagccgcaagccgcgatgtgcggcaccacgagcgcacacgaaacccggtcggcaaatcgtccaccagccctaccaagccgacacttcaacctcccgttgtgtacgtcacaccactcgatcagatccgagagggattgcctcggccgctcagtacgcaacacgacaagttccccccgtaacgttagcgaccgaccgatgcagttccgagccgcgttgctggcgctcgcctccgtcgcctttgcggtgcgtagaccccccgctctcccctgttctaccctcccacccacgcactaacgccctccctcgttctacccaccacaggcgcagagcgcgcaggccgcccccgtggcgctcaccgaggccacgttcgaccaccagacgagcagcggcgtgtggttcatcaagttctacgcgccctggtgcggccactgcaagaagctggcgcccacgatcgacgagctgtcggaggccgagggactggcggtgcgtagcagcaacagcagagggggaaggatgcggtagagtgatagagtggactaataagtgctgacgtggcgctcgttctacctttaggagaaggacgtgcacgtggccaaggtggactgcaccaccgagaggaccgtgtgcgagcgcttcagcgtgggctcgtaccccacgctcaaggtggtgacgggcggcaagtcgtacgactacaacggtcgccgcgacgtgcccgccatggtggcgttctccaccgagggctacaagaaggactttggcgagcgcgtgctgtcgtacgccgagttcggtacggagttatctgctatggatgtattgcagttaaggaggaggatctgatggtggttgctataagcagtggagcagcgcaaggcggcggctgctgagcaggcggagaacgagcgcaagagcgccgtggtgcacctttcgaccgcttcgttcgaggacgaggtactcaacagcaaggacccgtggctcatcaagttctacgcgccctggtgcggacactgcaagcgtctggtacgttggatcttgatgataagtggtttgaggtgtggaggttgacgtggtggtgttcctccttgcaggctcctacctggaacaagctgagccgcacgctcaaggagaacggcagcaagacgcgcgtcgccaaggtggactgcacggtgcaccgccgcgtgtgctcgcgcttcggcgtcaacggctacccgacgctcgtcttcgtcaacgaaggccaggtgtacagatacaagggcggacgctcgctccccgcgtaagtttcctacttgttctaggtgaacggtgtgctgtgactctaatgagcgactgctggatggtttgtaggttcctcgacttcgtggagagcggctggaagaaggccgagtcgactggcccgatcccggaggagggcttcttctccaagatcgtggacatcaccatcgagtgggctacggagcacaccgtcctggccgtcctggcaggcatcttggtgatcgccatcgtcgtggccatcttggttgctatgctggactactggctcggcgcggacgacgtggcgcagtacaagaaggctctggacgagaaggaggcggagaagaagaaggagggcgaggacaaggacggcgaggagctgccgcctcgcgtgccgtccgccgcggaggccaagaagactggccagaagcccaaggacgagtaactcggctccctcgctcgagtggcgcctctttaggtcttgctgctgctgcgcgcgtgtgtggacgcgtgaagcgcggatcgatagagagaagaaggaagaagacgccggccgctgacaggcagacagactagctgatagttcgttcgttagttaaggttcccatcaaggatcgacaatgagcatgtacagctgcttcatacgtatctcgttcgcattaaatacttgggaagcccaagggagcctcaacttgttgcagtggtggcggcaaccgacgtccagtactcgaccacttccaggaaccacatgggttcacgctgcagcttggcgtcaaggttgacgacctgatgagccagcatggtgcgaacggagcccgcagcgtccgccttcatcttctgcatgggaccgatcgccatgatgtagtctcctgtgtcacacacacacacacactcaaccagtcagcaccctgacaaagcttcatctttgacctgttcaattgacctacccaattgcggccgtgcatccacccctggaggcgcgttcttaaggaaaaccttgagctccaggcgcaagacgcccgtgccgtcgtctattgtgcactgcctgcggtcctcggacgtggcgaccacgacaccctgccagagcagaccggaaggcatgagctctacctgcctgggtgggaatcattgggtcggtctcacctgcacccagagacgcgagcagtccacgccgttgatcgtgggcgtcgaccgactcgaagcctgcagcgccgcgtagatctgccccacgaacgccttgccggtgctgccggcgccggcgccgcgcttcaccgacatgtccttaacctgaattttgtggacttgccgaaaaattcgccttagaagaagttgacgataagacttcagataccgccgctagatagagaaactacatagactaacgtcagcatggtcaacatcgtggggctctcgagcctcaacaaccgcggcgacgacgaccagcgcgcgcacggcgagacgcccaaccagtactacgcgggcggcgcgtcggaccgcggcggcggcagcggcctgtcggtcatcggcccgggcggcggcgacgaccacgtggccaacatcatcggccgggcgcagcaggacgcgcgcgccgccgccgcggccggcgagagcacgcagccgcgccacgtgatcaccttctaccgcgagggcttcacggtcaacgacggcccgtaccgcgcgcgctcggacccggccaaccggccgttcctcgaggcgctcgagagagggtgagccattgcgctgcattgattgatacagtgggtacggtacgtacggtgtattgactcggtcttgcaatgcaatgcaatacaatgtagccatgtgccgcaggagctcgagggcgagaaccgcaacgagcccgtggagatcagccttgtggacaagcgctcggaggactacgtggcgcccccaccgcccgcgtacacggccttcagcggcgaggggcagaccatgggctccgcctcctacgcggccgacgccgtgatccaaggagcggcggtgccggcagagcgccccgtgatcgacgacaagaagcccacgacgacgctgcagatccgcctgcacaacggccagcgactgcgcgagacgctcaacttggaccacaccattcgggacctgcacgcgatcatccagctgtacgtggagactgcaagagacgaaggaagtggttatgtgcatcgagtgttgatcatgtgtttattgttgcttttgtaggaacgacgctggtgcacaaccgtacacgcttctggctggattcccgccccgccccgtgtcgacggatctggagcagacgatcgagcaggctggactcaagggcgccgccgtcacgcagaagctcatttaaacggcgctctttgtgtagcagctcgtgctagtttttcgagacagcagcaaagaatttgtgttaccagcaacaaatgcagttcgggttgaaaattgttcaagaacagcttgaatagacacccccaagctgagcagagcaatgcgagcgagtccatcggccatgcggctggagcagcagttgatgaacagggtgacctgcgaaactttacaccaatggaacccaagctgtcgatgaagagccccgagcactttggagagaactaccctgcaaaggaatgaaaagctcacgtcctggtggttcaaccgatcacgcctgaaccgaaaaaaactttttttcgttctctcaccggctactttccatttagtggggatgcattgcattctcgacagctacattgcatttctgatggatttatttcattctgtacattcgaaatggcattgcatatatttttcggttcagggcttatagggttaactgttcggtgccgtaccgaaacaattagaagggcagcatcgaagcaagtttctggaactttaacctagcgtccttaatagcatttctggcctttaaaggttcggacaaggttcgcggcaggtttaagtacagaagtcgctatcatatatattttatctagatgatttaagtacagaagccgctatcacatattttgcacctaggtgtgaagcttaccttgcgaggtttgtctggcatggcacaaagcaatttgccatgccacgcgaacctcgacgccgcttccacaacgatgatgaagacagcgaggcgcacatggacgctctcgggcaatgcctaaaaggccgagagcgcgcccgagaccggctgatcgctcgtctccgacgcctcgacgaagaaatcgaggcgatagagcaatccatgcaccggctcgctcgctacggcattgagcgcgatccagccccaacgcctccgccacaacaacagtcgcctgagaggcgctctccacgaactcctgagtttgtcgagacctacggagaccctgttcattccgacgaagtccctgccaaatcggattgtctgaaattttacggggagtcgtaacgcgtcgtcgttcccgagcaactcgccggcgtcaacgcagtgaagagaccaacatgaccgcagctagccccggtggtccagacttggatgcaccttcatcgcacgatgacagcagcgccaataattcggacccagacgattcggaccaagacgtgtcgtcggagatttcagaaagcgagaaggccgccccaacagtttgacaaagcctggctattgatgggacgctcgaacacccagtacgctttgagtctctagccgaggctcgaggggttctcgacgggctcgagaacgcaagattcgcgctgtcaaacaacaacagtgtgaccaaacgtctctggtgtacttctcatgttgattgcacagctgagacacgtatcactcttgatcccgacggcaagtttcggttgtcgcgtagtggtatgcatacggcagttgtggcaccgattgagacgcagcggacggggattcacaagccattacttccggagatcgacggtttgctgctgggaggccaaggtcccaaaacgtgttcgatcaccctacgcatgaagtacgatcactccgaagaagttctcgccttgctgccatcagcttctcaagtcaaaaacagagcacaccgactgcgaagacagggggatttcgacattaccacctacgctgatgtcatggtgtggtattggaaagtggcagtttccaacgctgttgacccgccagcccgacaatcaagttcaatcatggggcgatcaaggcgaggtcaagcgagagacggagatggctgcttctgattggatgatgccattatcctcggtagagtgacaggcagtggccgaagcctcgtcggttcctaatagaaccccgaacgaggcttcatggtacccacttttaggtacagatgcatttagttatgtacttcggtcgcacttattagtgtggccgcggtcggcatttgatgtgtccggaatcgccttattgcggtcgttcaccctagatatttgtatagggatatgggactcatcataggatgatcagaacgaggccccagggcctcagaaaactcagtaataaaaagacagtcttcccccaaagccaacaagggtcaagtccgacttcggtaagtgtagctagcttattgtagtgcctggacacgctcggctgcgtgtggatgcctgtcggggagcttatcgtgcattgaccgagagtttccttggcagcaccaagtgttggcgtggccagagaggcaggaacggtattagtgtatcgttcggtatatatttgtgggattagagtatccctgagtgtattagtctacctaccgaggttttaccttggtccccctgtataaggcctaacacgccggtacccttcctttctgagggactgcagtggggttgcgcgaaagcgctacatagtatcctagccttagctcgtggctagcggtacaggtttttgggttgaccgaagacaacctaaggtgcacagaggcgcttgcaaccgacccggtgtaagggatcgttcctggtcttcaggttttgatccaataagcgcttacctttgcgggttagcgtgttgttggtgcctctaataccgtttggtagaggaggactttagtggaattaccacaacacaactggtgccgcgactcgggattggtgggaccttctgtgtgtcgtggttgctgtaagtctttacccccaacgagcgaagaggagaacaagaagaagaagagagaagatggcgatgggagtgaaatcagcggtaccagcaacgccggccaagtcgagtggaacgcgcaacgagacttcgatgcgctccggaagctcattctcgaccccaacgacggatcggatggggtcgattgacgagcattcggtgagctacgacacggcgattgattcctcggacgccaaagaagatgacgaagatgatgactgggatgtccggactgcgatgtccgagacttcggaagctgcggttgtgtcggcaggtcgcagtggaggatcaaggtcgattacccgcgacctctccgacacgttcaaggacatgccgggccccgagcccgcctacgacgcggatggcggcgccaccgaggacttcaaaccctcggtgacggtaggagaggcaacctccaagccggttggcactcgtcctcccctcaacggggatactccggcggctaacaaggtcctaggccggtgcctagacctgatgaagaccaagagcgaatggatgcagttgttctccccgaagcaagtccgccaggccatctggatggacctcggaggggcgttggctacgccgatcaactcaacgagcactcggcacgttgcgcagaatactgtggacctcctgcgagctatggggtgcgaaccccaaatcctccccacggaggctgcgctcgcaagttggacgccgaccgccgctgccacggcgttaaccaagtggaggaagaagctgcgtaatgcctttggagtggcggacgtcagttcgcgaggcccaacgatgcttcgttcgacctcggaggcagtagacccgtcgacggtcccgctaccagcgacccctcggaagggagccaccgatgacggtgtctttgcaaccaagggcgaagcctcgccgtacatgcaagactcgcacatggtaactccacgatctacggaccgttgtgaacgtctggctagggagaacgaggcttcattcgccacgcctggcacgcgcggagcgaccggtcgtcggtccggccgacgttacgacctccaagatgattcgtcggacagcgacgacgacctcgggcccgactactacgaaggggacctaccgagcgaatggacacgtcaggtgcgcgagctaagcgcgaccgacaaccagagctcaaccccaaagctcgagatcgccacgcatttgcctctcgccaacatcaagccgttctacggaacgcgcgacaagagcgagcactccatgcagtggctccgaacattcatctatgagatgaagggaacgcatgcaccacccaacgagtggtgtatgccgttcgaacttaagctcagggatggagccctgcactggtgtcgccagctcccacgcaagacaagacgcacgtggaagttgctgagcaaggcgttcatcaagtactattgctcgaagttttccctgtctgcgaaggctcggtacgactcggccaaacgggaagacaaggaacacgtttgtgactacctcaaccggctgaacggctacgctcgcaacgccggtgtgcaatttgaaaatggtggtcgtgacgcgaaggaccacgtggaccacttcttggtcacgtgtgacgtccgaaacttagaagaccgtctgtgccacgtccgggtcaagagcatccatgacctcgaagacatgatcaacgacatcctgcgtcaccgtgaccacaaatcgaacgagaatcgtcgttccgccgctctcggagtcaagatgatggacgtcgacgcgatgcgaagtcgaacgaggattctcgtggtggctaccgccgcgaacgacgctaccacgacgaagaccgtcgcgaacgacgtcgccgtgacaacgaccgccgcaacgaccacagtgaagacgaccgtcgccgtgaccgacgcgatggatcaccgtaccagtcccgagtcactttggttgatgcgctggccgatgtgatggcggaatggaacgtcgaaggctcggtctctgcacgcaacgagactccatacgccccccgacgtaatgctgaggtgaacgaggattacttcgaggatgagcgccaatactcggacgaccaacgctcggacgaggattcagacgctgattacgactcggatgggtctaccggacatgtcgctgctgctaacgatgctgagcgcagggccgcagccgaaggaacgttcgctcggtctgataaccgacgcttcaggaacggaggaggaccgtccaaccatgaacgagatggtcgacgctagtatgggccgtgtgccgcgtgcggaagcccgtcccactcggtgcactcctgctaccggcggtgcaaactgtgcaaacaggtgcacgacgctgggaagtgtgaagcactccacgagctcaccaagctcctgaagtccaaggtcgacaagaaggatctgtcaccagagctgcaaagcctggtgtatggaagccatttaagctaagcagcccgtcaactgaaactgggttggtctcaatcgggctgccacagttagctgagtctgctgttgatgcggactatctgttcgcgttcacggggcgaaagcaaatggcctgacgccctgaagaacaatgaacgtgtgaaaccgacggaaaatggagagaaccgggacgcaagtctcgttgcgattggtattgatgaagatgatgatgataaacgtgatggatacccgaccgaggctttgatcacaagtctagcccagataagggggccacctcggaacctcgttcgggcggtgaaattactgcccggtgagagactggggcggtgggcgtcccaacgatacgacaagaggaagcgaatgagggctttggtcaatggcgtagtggacgacgcgcgtacgaggatactccttgacactggagcgaatgttagcgtgatttctgccagcttcgccaagtggctacatgtgcgagacgtccgggaccacggacgaagtatcgaagtccgcggcatcgacccaggggtgatggagacccggcgacgggcgctcgtcaagatcaccctcgggtgggagcaggtctacgaatttgaaatgtggataatggatcacagtgccggggtggatgtgggccttgggatggacttcatgatcccggctggaatccggctggatctatttcatggcaccgcacgccttccggacgaggtcatgataccactgctaaagtcgcagagtgctgaagatgacgaaccttacggcacgcagccttcgtgtgggccgatcgaggatttatacgtacccggtcgcgagtggcgagagtttcgactgccgcaccagcggctacctcgttcggagtacgatgtgtgggtacgacgcacgggcaagctcgtgccgaccgtaacgaggtttcgacgggggcagccgacgtggatacggctcaccaatattacgactacagcggcacagtgcgccaagcatgactccgtagtgctgtgggtagcgcatggtgaactaccgcgagagaccggatacgagaagttggactctaacaagtacaaagagtggcaggtgttggcctattcaacgagatgtgatgagactctgcaaggacgagaacgtcgtctctacgagcaatggttggctgaacagccgcctgcggtcgagcgccgaacttacccgacgccgcgaaagatcctgccgaggccaccggatgtaccgccatggccagaaggctgtcaacaagctccgttggatgatgagtactcgttacccaatgtacatggctacgaagacgaccccagggtcagtgaaggctcagtcgatgttgctcgagctgatacaaccgatgtggatcgtgctggtaggtcgaacgatggttcggacgacgaggccaccgcgtcgtatgactcggacgtacccggagactcgccgcctagccgaacgggttgcctgcccgtgaatccgaacagtggtgctgactccaccggccagggagcgacatacgactcggttgaggcatcggaagccagtgatgagctgagtgatggtgacagcgtgacgaacgacggttcggaggatgaccgcgacgtggtagcagtggccgagacaattacatgggatgtcctgccaacagggaccgctgcgtccagcctggagccagaggaaacgtcggctgcggtgtgtagtagcgaagtcgactggggtgaacaggacccagggcctaacgacgttcctactgaagccggaacctccactgctgacgccgacactgaattccatgattcggatctaagtgcgatcgacgaccccgagcagctactggaggcgacctatatctcggtcatgcatgccatggttgcagaagggtctggcgaaggtgatgacaccgtgaacgacgtttcggagcacgtcgcgaacgagattgagcttaccgactacgcgcaagagctggagttcttgccggacctaaccgaagcgtcggagacgacgctggactactcggggcaaaacgtccagagtgacgaactcagcgtgaaacagcagacggccctggtcgatgtgctgaagagccacgagaagatcatgattgcgtgcggtaacgccctgccgcctccagcctacggggtcgtgtgtgacatcaatatagaggggcacgcgccaatcaagcagaaggctcggcggaccccgcttcgcttcctcggtaagctgtacgaattgctgaagggtctgttgaaagccgggcttatctccttctcggacagcccatgggcgtcgccatttgtcatcgtcctgaagaagaatggggtggatatccgcctgtgtatcgactacaaactcgttaatgcgatcaccgagattatggagtacgccatgcccctggtggatgacttgctgacggacatggaggcgtacttgtggttttgctcgcttgacgccgctagcggcttctgggccattatgatgaccgaacgtgctcggaagatctctgctttcgtctgcgcactggggcacttcgaatggttgcgtatgcctttcggcctgaagaacgcaccgatgatctatcaacgcatgattgacaacgcgctttggggcttcgtccaaccgacgggaggatggtttaaattctcggagcgcatgcgtctagctgaagaacatgacaaggaagctcatgctggggtgaacgaggcttcgactggcacggcaaagccattccggaccaagttcgaggccgaccgagacaactcgcttggtaagggagctgtagccgaactggtcaacagccctatcgccgacatgttcgccaacggggagcccgatgactcctcgttgacaccagtattcagtcgccggtcattcgtggatgatatctgtttcggtaccgagactttcgagtcgtgcttggcgacgctagaccgattgctggcacggtttgaagagtgcgtattagtatcagcttcacgaagagcatctttgtgcagtccaaggtagacttcctgtcccacgaagtctcggcagaaggtatccgaccggacgctaagaagctggctggggtggccgagcttccgttcccgtcaacgaggaaaggaatgcagtccttccttggggcactcaactattacagtcgcttcatccaagacttcgcggtctatggagcagcgctgtaccagcttaaggacgaggacttccagcccgggggtgacctcaccgcggccaagcacagcttcgcgatgctccaacagaaggtttcagcagcaccgatactacgacacttcgaccggaagaaggaggtgcatgtcatgttgttcgccaacgagtgggctctaagtttcacgttgatacaagaggacgagggcaaactacaccccgttcgcttctgcggacgtgttttgaaggatgctgagatgaattatcacccggccgagaaagaggtcctcgcgcttctgctgatactgaaggtgtgttatactcaactcgttggacagagaatccgggtctacactcggatttcgacactcgactgggttcacaagtccaagacattgttcggtcgggctacccgattcgccgtcttgctgtcgccgtggcacctgttggtcgaacgagtcaaagaaatcgactgttcgtttgctcagctacttcaagccggcttgacgaacttcgttgacttggataagtcactggcgttggtcacaccccggacacgagggtcaccaactgctcgtttggacccgcatctgctctacgcacgcctaccgcggtcctaccgaggtttcgttatgtcgtttgacgggtctgcgaagaccgagaagaacggtggatacggcagttgctcgtggatactatggaagctaccagagtggacagtagtgcttgctgcgagcgcttacctcgagaacaccacggtcaacctcgctgagtacaccgggatgaacaacggcgtctctgctgcattacagcatggagccgacgatctagttgtcgttggcgactcgaggctcgcgatccagcaagccctaggggtgatagcctgtcggaaggagtcattgctgcaacaactcagccagcaccaagaactcacggccaagcttcggtcggtgaagtacctgcatgtggtgagagagtttaacgctgcggtcgactctctggcaagcgagactctcgagtgcaaggagtctacggtggtatcgtcggacgaccgagtattagagctgatgaagctgaaccgtatcactgaagtcatctacgaggctgctgatggtgcgtcgtcgaggacataccctcggccaacacagtatgggccgtggtagcttctgccaaacctcgtagcaagaatgttttcgattttgtgcgaagagaaaccgaccgcagacggcagaacgagactgaacccggacacgtagctgtgaagaccagacgtcaaacgagagcaaaggagaaacacgtccggtttgcagatgaagtctcggtcaccgatcagggggacgcatctcaccgagtagaagctaatggtgggccgaacgagtctcagaatgaagcaaaagcttcaccgctgcgtgccgagacgtcgccagccccaccgaacgcagaagacattgacccgctggtagtacaggaagaacgccgaaagagaatcgcctccgctcaagatgaagagttacggtggtcgaatctgacggcagtgctccggtgagatgatgcaaagattggatacagagcagcacgagatgcatggaaaatggcggaccaatttgtgttgaccgaggatgatgtgctatattacacaagaacgagtcgtcgttcaagtgacggcgagcaagccgagttgaagatgagactcgtggtgcccacaacgatgatccaagaggtcctgcaaagctgtcatgactcacttgaaggcggtcatcaaggtattacccgtacgctacatcgagcggcgagagactattactggatcggccagtatgccgatgtggagaaacacgtgaagtcgtgccctgactgcggttcaagtaagagccgacctcagttccgcgggtactcaccagggaacatcctagccgagagacccttccaactagtctctatggacttcgtgataccgctaccgaagagtcgccgtggcaacacggctctcctgctattccaatgctcgttcacgggattcgtgatgggcaaagccatgtctgacactaccgccttactcgttgcgcaagctttcgaggagtgtgaccaccgacgttttggagcaccgtccttgatccgtcatgaccgagatcctcgatttatgagcgaggtcttccaagccttcgcggaaatgatgccgtctcggtcgagagcgaccctgagctaccgcccgcaggccaacggccagcaggagagatcggtgaagacgatcatgcagtcagtccgcgtatacgctgaagacccactacagcaggattgggacgagatcgccgaaagactgatcttcgccatcaatagctcccgtgatacgacgaggaaggaaactccgttttacctcgttcatgggtgggacgcacagtcgacgctcaaggcaatgtcctcgtcactcattcgaggcttcggtagccaaactgacgcgctagcatggcgccgagaggtcaaccgacagcaggaaatcgccctgaggatggccaaggagtaccaagccgcggaaaaggctcggagagctgacgagcacaatgcgtcgcttggcaggaaggagaaggaagccatggcaggcgtcaacgagaatagaacctcggtcgaccgggcaccgagttcccctgaccatagtagagctgcagtgacgagaacgaggttctctttgcagcccgggagcagagtgtggctgtacatggagcgggttcgaccaggactgaccaagaaactagcccatcggtggcacggaccgttccgcgtgaagaagaaggtcgacgaatttgcgtatgagttggaattacccgaccgaagtggataccggttctacccggtggtgcatgtttcacgactcaagtcagtggacgagttcgaaggccgaccgagggttcgtttggctcgtgaggtcaccgaagacactcgtcttgacttcgacgaggaattactgcctgaagacaggtttgagccggaccgcctggacggcgagtatgaagtcgaggctatcctcgatgaccggataccgttgtctacgagcactcaccgggccgtccgagagttcaaggtgaagtgggtcggctatgacgagccgacatgggaaccagcgtccaatctctcgtgcggtggcctcctgtacgattacctacgccggaagcgaagcgacagacgtttgcaaatggtccagggggccgacgaggagtaattctgcgccccaacgaggattgaatcgctcgcgggggcaatccagcccgcgatgtcagacgaacgaggctactggagatgatgattgaactgcctgcgagggctatccagctcgcagtgacagacgaagaaagttactggaatctgcatgttacgtgttaagtgaacgagtcacgagtgaatggcgatatcggaatggagccagggacaacggaagacgcaagcaagcctcggtcaaaccctcaacagacgaaacaagcaatgatgaagcaaatgggagggcgaccgaggcttcggacgcagtgattgccatggaagtagcacgaacaagtgcgctcgacttcgtggttgagtatgaagttgatgatgaaatgggtatgcaagctgtcgacaccggatactcgcagcagaccgggtgtaccgttgtcaaaattgggctgtcatgcgaaaacatacccgcaacggagctagcgtaagtacgcccggtctcccgcgaatcaagtccggtcttcaacgagcataagcccgatcttcttgcagggagacaagacgaagcccggctaccgcagctacgaaccaagcctcgtttgaggcagccacagcggtcgagggcagagaagacgctctgggaaccgcgaccgagtattgaatgcgatgtgcgttgacgcgagaaaagattatgaaatggaacgaacaacatgacgttattttggattgggatagcacatgcagcgtcgcctaaagcgccacggacctcggtcgatattggaaaagaacgtgaacgaaacggtgaagctggagcggggcctaacgaggctaaatctccatcacagtctgagccaacacgcccagacttgacccggcggcggaagaagcttcacccgactccttcgcctcctcatcggggcttggagagcgagaacgacaagcgtttgcgaactcggccacccatggagcgaccaccatcgaagtccgcagagaagattcgaccacgaccgacgacgccacagtttcccgagtcgattcgttggggacaaacaacgggacgtcgttgcaaggggcgaaagccgtgttgtaggggtggtctgccggcgcttggaaccaacagttacgccacggctcgcgggcatccacgtccgccacctcggagacccagtcgtcggtagtggggacccactccataacattgaacgagtattgcaggtacgacggctccagcaaaacctcggtgcggtgctgtggaggttgtccgtcgtacgtaatggccccattccacaccttgtggagcatctggtctcgcaagcgatctgcacgataactgcgctctcggtgatacttggaccacgcttgtcgaagcgctgggacttgcacgtttcgctgaccgagggtgctggcgaggttttcgatatatgccttgacagctttacccctaatccagtggcgacgctcccacaaggcgaaaccaaggtcgaccctctcggtggagtggtaggagtacccctggaactgccgccataggcgaacgagaagagcccgaccagttgcacgacgggatatagccaccgaggatggaaaacccgtcgtatcgatcaaacaaggctcgtctgggaaaagctggcgcaacacttggaaggggtgagcaggatccgtccacaagccaaactccacgattccatccactgaactgggggcgaccaagtcgtcctcgaagacgagggggacactggcgttttggatgagatgccagcattccgacgctccgggtgccgtgaaacccggctccaagaacagggtagcaagaccactgagcttacgcgatccaggagctacgtcggaagcgtcaaccactgctggggcaatcgacgcaggtccagccctcggtgaagctgtcaccgttgctgttaccatcgcccgagcgtgaacagaggccgaccgagtgtggagtcgactcgggagtggcacggtggccgcttgtgaagctactggaaccccggtcgcggcagccagaggagaaggagcctccgaaggagcgacaggttgcgccaccgaggtttcctctctttcgtcggggccgaacatctccaggaacaacgctgcacggtcctcggaagtctcggactcatgaggcgactcaccgctaggtgaacggtctggcgggccgccagagccctcggtgaccccagcagccgattctcgaggggcacggccgacgccggctgtaccagacgagactggcgaaggaatggaagtcgccgccgaaggcgaaacctcggatggaacctcgatgacagtaccgaaaggctcggtagcagaaccttgaaccccctgagcgctagccgacacccccggaatctcgccgggctcaaggccatattgtgaagtgtcgctaggactcataccccctccaaactccacgtcagacgattcctgctgctgggatggggctggtgagggaggcgaagcgcgactggccagccgaggatacaaggggacgtctgagtgttcgtacgggagaggctgagactccaaccagcttgagcgagccgtcgttggaggacgcaccatcgaccgaggaggcggggaaatctctcccgatgccgaacgaggattggatggcgcggcggccgctgcagccctggccttcaggtcgactgacggtctgccgtagcgtttgtgaggaggaggctgggatgccgtattcccgatggaagcagactcggtttgccgaccccgcttgcgcgatgacgactcagtggagaccggggaaccagcagaagcgtccactgaagcagcgggagcggacgtagcctcggtggactcagccatcggcacgtcggtcgtcttggactcctctccctcctctgacgaggattcgtcatggtgtggactctcgacagtgaccgtcggtggggacagcccgagaagattccaatcaagctctgcggcggagatgccggctgaggccaggaccaaggtgtcgacgtcgagtccgtgtgctgccgagtgccgacgaaggatagaattcgctcgccgcaagctgttgttctcgtccgttaacgcttgaatgcgtgcggggatgacgtttgctcggtcgcggtcggccacctgcttccgaagcctctccaactgagtgttgtaggtaacgaggcttgcacttatacgctcgtggagctgggtgttctgacgtacagcagcggccgaatcggcctcagcaacgagcgtccgcttctccaacgactgagtgacgtcagcgtggtgagcgatggccgcgttcgcttgcatcaactgagcgctggcgttgctgagctggacgcgcatgtcctggacgaggtccagagcttggtcgcactcggagttggccgagacgaggaagtagtccggcttggtccgcaggttcatctcttcagcgagtttatctttggcgtcggagagctctgcctggagccggtcgttctcgcggcggagggccaccagttcatcagcctccgcaagaaggagacgcggaggagcaacggcggcagccagcacctcaccgacgttagtagcagcttgcaggctgtggtcgagagcagcgttgactcgagctggaggtgaacgggcaacacctactacgagacgagcgagttccagcatctgctgctcgcccaagacgaccgctgtcggaggaacctcggccgggccagcaccagctccggcgcgaccccctacagccgcctcccccccccaccccaccgacgccccgcgagttgccaacgtgaccgaaggcgcgggagttggcgacggtggagcgctggcgcttggcggcggtgtcggcggcgagtcgggagcctcttcactggaaactgccggcgagggagtctcggtcgccccagcagcagactcaggactacttggaggagccgggggagggtcgaccgaggtcccggaggcggcaggaatgagcgtagggccacctgcaggcgaggccgggactggagacacagcaccagcggcgataagggcgggggcacccgccgaacgagcctgtcacgccggacgacgacccgaagtgtcggtggcgacatcaacagctcccagagatgaccaagatagagatggagtcaacaacgaggatccgaatgacagtgaggagcagcgggagcgacgaacgtaccggtccggagcactggagagcccgaagagcagcggcagccgcgtcggcgaatgcatgcgacggaggagccatggagtcgaagaacggaggacgcctagacgctcacctgtgtgggaggctcgcgtcgaggcgggggcagttgtggtattggaaagtggcagtttccaacgctgttgacccgccagcccgacaatcaagttcaatcatggggcgatcaaggcaaggtcaagcgagagacggagatggctgcttctgattggatgatgacattatcctcggtagagtgacaggcagtggccgaagcctcgtcgggtcctaatagaaccccgaacgaggcttcatggtacccacttttaggtacagatgcatttagttatgtacttcggtcgcacttattagtgtggccgcggtcggcatttgatgtgtccggaatcgccttattgcggtcgttcaccctagatatttgtatagggatatgggactcatcataggatgatcagaacgaggccccagggcctcagaaaactcagtaataaaaagacagtcttcccccaaagccaacaagggtcaagtccgacttcggtaagtgtagctagcttattgtagtgcctggacacgctcggctgcgtgtggatgcctgtcggggagcttatcgtgcattgaccgagagtttccttggcagcgccaagagttggcgtggccggagaggcaggaacggtattagagtatcgttcagtatatatttgtgggattagagtgtccctgagtgtattagtctacctaccgaggttttaccttggtccccctgtataaggcctaacacgccggtacccttcctttctgagggactgcagtggggttgcgcgaaagcgctacatagtatcctagccttagctcgtggctagcggtacaggtttttgggttgaccgaagacaacctaaggtgcacagaggcgcttgcaaccgacccggtgtaagggatcgttcctggtcttcaggttttgatccaataagcgcttacctttgcgggttagcgtgttgttggtgcctctaataccttttagtagatgaggattttagtggaattaccacaccacaatggtttgggcgacgccaagcctctgcacaaccccagcagcattttttggtcatatgcgctacactcgcgagcgggacgctaggcgcatcgttcgccaaccctttgagtttcaaaatgagctcatagtgctgtacggcttcaccgacacaatcgacagtggtgacatctcggtcggaatcatcttcacttcgcgaaggctttttcgaacagctccccgaacagtggcaggtcaaaatggcgagatgctcggggtcacagatggaacatacaagcttcacttcggtggttggacgcttgtgtcttttggcacatttggacttcgttacaccgcttcgcacgcgtatcaacagaagttttacccgattgcattcatgttcgtcaggacggagaccgcctttgcgtatacgaagctgttttccgtatgcaagcaacggtgccaagaatgtttcggcgtgacactggacctatagtttggctcattggaccactccacatcaattgcgaacgttttccggacagtctgatcggagatcaagcttctcgactgctggccccatctcgaccggaatgctcggaagaagaaagggttgcttgcagagtacaaccgctacaacgacatcatcaagccccagctcgattatttgagtcaatcgcgctcgaagcagcaattcgaggcgctttccgcactcattactcagaattgggacgactttggtgaaggcgagtatgcggcgtggctagacacggaatatcttacagagccatgccacctgtggttctatacggccagcgacgttccaggaattattccgaaccagaatccgattgaatcgcaccaccacagcatcaagactactgcagtgaatcagctgcgggcttcaacagggcatgtgcttgcgtcgactctaccgaaaatcctggtcgagtgcgtgatggaaatcgggtcggagtctatccagcactttgcagctggacccgtttccgcagaggttctagcagctggtgtactcctctgcaacgacgacagccatttctcgactcaccagcgcaagtcgcgcagagcaatctgcaacatccggacgcattacttcaaccagagatactccatcgtccgggacgacaagtgcatggattgaaggtgaacgcgagccgaacaaagacctctgagagctcgctcagcggatccctcaaggatgatgaaattgtggagaatgtccagcttcgataactctcactgcacaaggtgacggtgttggatcgacttccgtatgagcgcgactggaactctccgttgtggtccctggaggagatcaacaccatcagaaaaaaggtcaagtgtgactgcaaagatttctaccagacggggtggctgtgtgctcatgtactaggatgccttcacctcgttgacaatcttgatttggcggtgatgcgtcgagggctcccagctcgcagtcctcccggtagaccgcgcaagaaaagcaaatgcctccagcgagatggtgtgagaacatcccaatactccgtcgatgccctggtgaaacgacttgtggacaagccagcaagtgttatcaactggagcgtgctaatcgaaaagacagttgccgaggcggatggcgaggggtcccagcgggcctatgttggcaagattaaaccccccttcactcgtggaggaaagcggttctgggagatcgcgtacgaggatcaagatgaagtgactgtcctggaagttgaagctcttgcaaggacgatcaatttctccttccaaatggggcacaacattgttcccaactaatgcatatcttcgacacaacagcggtagcgtgaagtttcagcagaatagcaagtggacgacataaggctagacgtagtgagcacttcgggcgctacgaactagggaccgagtaacccggacatttgttttacatttttcaataaatgcaatataacccttgtgaatgcaataacaccaccgaaatgaaaactagccaataatgaatgaaaagcagactttttgaccataaatggaaagtagccgctgaaagaatgaaaaaaaactgcgcccgcctgaacctgcttggaagcgatgaaaactccaggctgaaaagtctctcaaggagatctagggatatgctcagttgtggttggaagcaatgcctagtgtccacgaattgaccgcaccctttcagaagccactgccttctaaccgacgagcccactcatctcgtgtcgccaccttgaagtgttgatggactcttccctcttcatgtgtgtaagatcaccgagtgtccaagtaactttccaaagccctattttcctctccacacagcatgacaagaccatttctctggagcagaagaatatctgccttcgttgggttgacgtgatctcgtccccctccaacgtacaacggtgtggcgtgacacaacgatgttgtcatttcaagtaatgcattatgacgaagttggcacccaagatgcaagggtggcatgtgatgctttatggaggaactttttggcatttcccgctatccggagctgtgtagttggccatagtgtcacgagctcaagcttaccctccgaaatggggaatggccgatattgtgtttgaactgtaaatttgtgaagtagtgcataggttgtacagcagcgttgcgtaaataaaaattgcaataacactattgataagattggggtcaacaattacaattagaaaattggctgcaatgatattattgtattgtacaagacagttgatttgataactgtatgtgcgtgggtagccaaccaaatgatacatacagaccctatacaaaccacaagaatacaattcaatgtctacattgtacaattaaattgtagcgtgacggcaaatctcaatcaatttttcaatataaattgacgcaacgctgttgtacagtatattattaatacaacttgtattgtggctttcatccgttttggcaaatcgggtggtccaagatccgatatatcgggtccgatttgctggagggctccgatttagcaggaaaggctgagggaagcaaactatatatggcccgatttgcgtctgggggctgcgagttgcgagcaggggccagaaatgccgcttttcgccggcaaaagggaccgcagcgaaaacatgtctggggccctctcagatcggcgtggcacggagttgaagcggccgtagatgttcacacatgtgatttagatggccatagtgctatgaagtggctatatacagtgtactattgtccccaatgtcttgcagttctaatgcgttctgagaggtggggaggtatgtccaacttggaatgcctcccctttgagccttatgctactaactcaggccaaatatagctaaattggactaaccgatcatgtgggagctccattttatataaatcggactccgagataacacgtcaaatagggaggcaaaatagttgaaaaccacaatacaactactaactctcgctgcgcgcagggccagaggttttattattggatgggaagtgctcgaatatgaggaactgctttcagaatcgggttccttgctacgccacgggcatcgcaccgtgcaacttatggtcttcttcgctagcatggtactacgtgcacgggtgcgctcgagtgagtgtaccgtccttcgggtccagacgccagagtagcaaaagcacgttgaacgtgcgtattattttcttcggcaccacacgcgccagtagcaacagcatgacggaggacgatcggtagatgtgttccccgtagtagagataccctgtgagcagcagtgcttcgacagtgatgcagcgcttgccgttgtacacaacgtacgcaatgtcgtcgtagtctcggaagagcttgtcgaagggtgcatcgaggcagttcctctcgaacgacgtgacgttgtcaagcagggatggccctaacttggtggacgtgatctcctccacttgggccacactatcagcgatgggcgggacgatagcgagcgacgagattgccacgacaactggaacgactcgagcaccctcgtcttcatctgtacagccaccttcctatcggtgtaggatatgatcgcagccacaagcgccagcgcgagagacagcactgtcaccacggtgggcatgttaattctgaagaggacgcaggcgtcgttcagtccgcagtacttggcaccacgcgcagaggttttgcacaagatctctgcgttctgggacagaatggacccgatggcggtgcgttggatggacttcagcagtagccccacgcacagcgtgatggcaacctgcatggctttccacgtgagtcggaaccgacggtccagttgtcggtcccccgaccgagccttggccaggttgatgaacgagtacgagaaggcgaagaaggagcacgtgaggttagcgatggactcgtccgtcagcgtccccgtcgcgagccctagcaagcacaagtcggagttgtacacgaggtggtacgtgacttgggcgaggtagatcacctgcatgacgccgttctggcagcggtaggcccagatctcggtcagtagaatggatcgcttgtgcgacatcacctgatagaggctcacgataccgagggcgagcagttgtgccaccacgagaccggacaagacactgatggagacgcgatcggcgtagcgactacggaacgtgttgagcttcatcccgacgcggttgccgacattggggtcgatgtagtgctcctattcccaccaggagttaaagtagttgtggatacagacgcctcctgtgctgcagagagggatgtcgttgggggagtgcaccatcgatccatagctcagccagtgcttggagacctcgcacgtgtcctctatgtagacgcccgtagtgttcactgcacgcacccaacagctgccgtagtaggctcggaagtaagactgcacgacagtagtcgctccgttcttcgtcatggaagcgtcggctggagctgagcgcgagattttggcctgactactggttgtaatgatctgcacgtgcaagagcagaacacaaccccatcatcagttgagtccgcacgcagagagcccaagtcgtcgtctgcatactcaccggttgcgcaagctcctgctccggcacgcctcagccaaccacttcatgtttaggaccgagcgccatgagggcgccctcgggtagatcgatagcagcaaacagacaaagacatcaattcagtttccattttactcgcaacacaacaagcacaaccagaaccttacacttggtagcacttgcgcctcaagtgcgcgcttccgtccagttccagtctccgttcgagtcccagttccagatccagtccagtcttgccacgcgtcgctagtgtgcacgccgtccagcctagtccatcccgcgttgcctttgcgcacgccgtcttcctcgcctacgttcttcggtgcgccgcacctgtacctctcgccgttcagcttctccgggtgcgccgcgtgcgttgcctcgtccgcagcttcgttccgctcgtcgccgacgggacctccatttttgccgggctcgctccttttctttctgggggaggagtggcgacgcgcattgtcacacgtcacttcgtgtcgacatctcattggtgcatgtagcccaatcactcccgggtgtccatacgcggcacccacctcgaccttccgcttgtcgcctcggctgtcacttgcaaacagtgcgcagtcgaatgtaacatccgcgtcggtggccgttacgagtctagtagtaggagtctttgtgctccgaggcgggttcgagttagcgccggacggaattgcaccagttgcttccttcgggacgctggagcaagtggttggtacttgtcggaaccagagctccaggacgagcgtctgtgacttcgttggggcttacagacattgtcggaagcagcgctcctgggagtgcctgcgacttcaaactttgattgatttggctgagagcttgcgcgccccagccatctactgacgacgtgtctagcgtaggcgcaaacatggatgaagcagctatgcagcacgcggacagcgtgcagcagatgttcgcctcgctcgcggcgatgatgcgcgatcagcagcagttcatggcacagacagccgagctgcagcgccagatggcggcgacactgcaacaacaacagcagcagcaatccacttcgcagcagcagcagcgtggtaccgcgagtacgtctcccacgacgggaacttcctgcactcggtctcgcagttcgaggagctgctgaccagcgagttcacgacccccgatcgccaagagcacctgcgcgaccagctcctacgccaacgccagaccaacttcgcctgcctcgaagattacgtgtcggccttccggcacatcatctgcaaggtagaggacatgagcgatatcgacaaggtcatgcattttcagaaggggttggtcgtagagatcaggcaagaggtcaagctgcgccagttccgaaacacgacggacgcgatttcatttgcactgatgtacgaccgaacgcacgctctaggatcgcgtcgaacccatgcgaaccggggaggtcaaggtggccaacgcctttaacagtcgttacatcgcatcgaggagccgacaccgatggagattggaagctcgcgcttcatttctcgcgacgagtgtctgcgcagtaatctgtgcttctactgcagggaacccgggcatcgcttggtcacgtgtccaaagaggccagcgcgcaacaacccccggggtgtatctcgtcctccacatgggcgcgggtccttccgcgcaaaccagggctcgttccgccgtattgtcgaagacgacgtatccgacgaagacgaagacgactacgtagacagccgtgacgaccacgtcgaggtcattgacagcttgcagttgaacatggtgtccatcgccaccgagccgtcaaccaatcgtgaactgtcgcgattcgagggggcgatgaacgggcgggcagtgcgaatcttgatcgacagcggtgcagagcgcaacattgtgcaccctggcctcgctcaaaactgcgttgagtccaccaaggtcacggcggagcgctttgacggtacgacaacgccggcccgtacgacgcaacaatgtttggagactatcagctttgctggcagagacttcaacacagtttccctcattgagtgggaagtgtcgacaaatcaagacgtgatcctcgggcttccatggctggtgcagttcatcccgggtatcgactggcaaaccggagtgatgcggttcccccaacaagcgcttagtgcatgatttcagttcggtgaacgacagtctcgaggtagcgggaccgtcagtggcttcagtggaagtgaaacctgagtttcttcagcaccccctgcccccgaatctgcggcagcagcttgacgctcgtgtaaaggcaggctacttcagtatgcctttggggccaagctcgataacagcgctagaatgtcagccattgccacgcatctttgacaacgaaggcgatgacgacacggaggcatcgtcgttgtgtgtactctcggcggcagagtttgagacaaaggtgaaggccgacgagtacgccgaactgtataatgtcacagtgaagacgtcgcccaaggtgaagtccgtgccgtcgcagcttcaagcagtacttgacgagtttgcagatgtctttccttcagagttgccgcctggattaccaccgagccgctcaatcgagcacgaagtggtcttgaaaccaggggcgacgcccagcaaccgcgcccccttccgtctctcgaaggttgagcaggaggcattggacatctttgtggcagagctgctgaagaagaactggatcgaagtgtcggactctccatgggtatcaaacatctttggcgtgcccaacaaggatcccgcgactggcaaattcccatcacgcttggagtggctacattcgaacaatccgcacatgcccattcgatgggtcattgactatcgcttggtgaatgcggcctcagatgttgccaagataccgctgccgcacatcgagcagcgctttgatcggatggtgggagcagtgatcttctcgattctcgacctcgccagtggataccaccagatgcgtatgtttccgacgtccaagcagtacacggcattcaggacaaaccatgagatatattattggaacgtggcgcctatgggcctggccggcatgccgggcacgtggacgcgccagatgcgcaagctgctgagccatctactgttcgtggtcgtttatctggacgacatctgcatcttctcgcggtcgatggccgatcacgtcgagcacttacggcaagtctgtgaaatccttcgggctcacaagctttacgttcgtccggacaagtgcgacttcggtcaagcttgggtcgacttccttggccacaccatctcagctgatggcttgcacgtggacgctcgcaagactcgagccatcgccgagtggacagagcctagcaacatcaaggatctacagcgcttcttgggcctcgccggatattatcgtcgcttcattcatcagtttgcgacactggtacttccgctgagctctttggtcaagaaagatgtggcgtgggtatgggatgacggtcagcgccaggctttcaatgccatcaagcttgcgctccagcacgcaccggtactacgtctgccagactttgacaagccgttcattttgacaacggatgctagtcacgcgtgcattggtggagtcctctctcagctgcatggcggcaatgatctccccgtggcatttttcagcaagaagcttggtccgcatgagctgaactggcctgttcacgagaaggaactctttgcgatcaaacaagcgctcacccgttggcgccattacctccatggagtctcgtttgaagtgtacacggacaactcggcgtgcaagtggtctctacagcatccccgcctgtctggtcgcctggctcgctggctggacttttttgcgtccttccagttcacgttgcatcatcgtccaggcgctttgaatgtcgtcgccgacgcgttatcgcgcgcccgtgatgcttcgtcaagtccgggggaagaaccggaggctggtgaaaccgaacccgagccgctggcagtgtgtacggcgtgtttgacgtcgccgacatgcacgaacattcgcgacgcggcatcgcgtcgtaccaaggctacggagaagctccaaagcataccgactcgcgatcaagccgtgatgcttgccgtcaaacagccagccgcaagggcacatggtgtaggcacggcacagtggcgtatgagattgaacgcagcatcgatggaggacagcacggtgataagcacactccaactggataacaaaacgaagcgggcgtttcagaaggcatacagcaaagattcagtcttcaaggtgctgtggaagtccggtcgcccgtcggaagagtacgaaatcattcgcgggttgatctatttgaagagcaacgacagccaacgccgcctctgtgtgccaaacaaccggaaacttcggctcgatgtcattcacaacgcgcatgatgcggcgatcatggcgcacccaggcatccgtcgcactcagcttgctgcggcacagtggtacttctggccgagcatggatctggacatcaaagcctacgttcagagttgtgagtcatgcatgaggtacaagtcaagcaccggacgaagagcagggaagcttcagccgatcccgttgcccgctgcgtgttgggatgttgtctcgactgacttcatcacgcattggcctgtgtcagacggctttgatgcgatcatggtcgtggtggacaagttgtcaaagcgtccagtctacatcccgacgcacacgacggcgactgcggaagacattgccaagctgttcttcaacaacgtcatccggtactatggtatcccatcgaccatcatctccgaccgggacccgaagttcacgtcgaagttctggaaagcactggtacagctgatgaagatcaagacagcgatgatgactgcccaccgagcgcaggccgatggccaaactgagcgtcagaatcggactctcgaggactcgttgcgatgctctgtttcgtaccatggcaacgactggaatgagcacctgctcatgattgagtacgcgcacgcaacactggtgtccagcccgtcgaagctgtcgcccttcttcgtcgacaccggtcgtcaccctaagaacccattgggtagtgtggagagcgatcagccggtggcgaggtctcgtgtggagtacgcgtctcgatttgttcagcatcatcaagaggtgatcgaacgtgctcggaagaatctgttggatgcgcaagaggctcaaaagaagttctacgaccggcgtcgtgcagcaaacccattcaaggtcggtgatctagcctggctgtcgacgcaggacctgaacatctcgcacgccaccgcggaaacgacgcttcgctcacggaagttcatcccgcgcttcatcggtccgtactcgatcctggaacttcacggcagcgtcgcgctgctggatctaccggccaacttgaagcacatcagcccacgcttcaacatcgacaagctcaaggtatacaacagcaaccctgatcgcttcgtcggccgtgtgatcccgaagtcgactcccgtgattttcgacgacgatggcgagccactacacgttgtcgaagctctgatcaagaagcgcatcttcaaccgccaacctgagtacttggtcaagtggcacgggctccctcaccatgagaacacgtgggaacgcgagcgcgacatcaaacacgtcagccactggcaagcgctgctaaacgatcttcgccaacgcaatcgagtggcacgggcctagtggaattctcttgaacagagttttcacggtactgttccttatatcgcgggtctacggtactaccaacttcaacttcgacgacttcaacgttcaaggtgccgggactcgctcaagtcggggggagtgtaatgatctgcacgtgcaagagcagaacacaaccacatcatcagttgagtccgcacgcagagagcccaagtcgtcgtctgcatactcaccggtttcgcaagctcctgctccggcacgcctcagccaaccacttcatgtttaggaccgagcgccatgagggcgccctcgggtagatggatagcagcaaacagacaaagacatcaattcagtttccattttactcgcaacacaacaagcacaaccagaaccttacactggtgaagctgtacgggaagagctttagttggtccgggacgactgccagcaggtctcggccgtctgtgtcaaacgcgagtttcgagcccacgagctcgtcggtgatctccactaccggacgacactcggtgtagtcggggaagacgtgcgtgtccacggcagggacctggccgaaatccgtgctgtcaggctcggtggggtactggaatagccgcacgacggacatcatcgtccaccccgtgacgcagtcttcggcgtgctcaatggccagctccagctcgcggatcatctgaggcgagaggttgagcttggccacggtgatgatgttgagcagttcttgggctgtgccggtgacgacgatgggggaggtcccccactcattcttgctgctctgacagagcgtcagcgcctcgtcgctcagagagctgaagtcgtacagcgactcagttggggggagggaggtgaagatgaagaatggcggtgcggaggtgattgccatgttttcaatcagcttgtacttgagcatggcgatcttgcacgggcctaggcacccggtgcaaccgccggccattgacgggtctcgctcagtgaaggcgaagatgctttggtcagcgttgatgaagaccgtgccgtccgataggtaggccgtcgaggtgaacagcagaatgagagccagcgggcctgcaatgacgcgccctgcgatagcgatgtacgcagcgacggctgcaggtcgacaaagtgagctccatccttgcgtcttgcgttggtcttggtagtacgcctcggcccaatgcgcagagcttcctttttcgtcggtatgaccgctcatccctgtgtgctcagcgcaccttttgcgaaattcactatgagcagtagctactgtagcgaatacaaacaataatatttgactagaagctgtcaatgacagcaccaagacctttcgttcagatttagaggaaagtctaaagataatctgacggacaagactgcgagcatggaggcaatgtaatgctcgacggggccaacgcagctccttcccagcacgggacttcatcacatcatatcacatcaacgatgactgcaatgacgctcgcaattagcgaccaacggtcaatctcatcccgcgtgggcctgtaaatcaactgaaactatgttaagaggccctctgttcctctgctttcgcttgtgaacctaccgatgcaccacgctatgacgtctgtgcgtgaacaaaatatggatgtgggagccaaggacgccgcgactaaaccaaacaaaaaaatatagcgtactgttgttggtcaaattcctcgatttgaagctgtgcacatgcgatttcttcttttcgatcgagtctagctgcgcttttaattaacaacgagccgaagactatccataatgacaagtcgaaggctaaagcctgctttgaagcagtgttgagagatagttcaattacagatttgaagtaggaaatactgtcactcaggagatctttactgaaataaagcacaacgtctgaaatactactttagtactacaagaccgatccgtttcagtcgtatccctcgccacaaggatatgacttccaacgcaattcaaacgaagcccaaagcacccgagatacgtatagtcggcgggtattttgccagctcagttgctgttaatgatgtaatatcgggcgtgcactcgcgtcgctgcagcagtttgtcaaacacacacagcttttggattggagattatggttcaagtagaaagctacgcctaccgccttgctgtatctcacggaacatacaaggaattcatcatgaaatcttaactcgtatagaattcacaaaacagcacgagtttgctggtacctaaattcagggtggccaccaattatcggtttaatttctgagataagtagcagtaatccgccaacgatctaaaagcgcgcttggaagttcacagtagaaggccttgcacaccgacattggatagaaatctgcaacatgatgatgttgcactcgaactgcgcccacgatttggaatcgacgactgtgtctcaggctcgcgaaggtgtgttcaaatacaagactgttatactcggtagcgaattcatgtacgaaaagcttgtttctgacgcattattcgatacgcttcgctaaactcgcgagcacatcatccgcagtgagctccgacctatccatcgccgacagaagcatcacctgcacgctttttaaagcttcgggcaacgggcaaaagtccttcatcagctgccccaactggaacaagtcgtgctgggactgcaggttttgtccttcgaatgggtgcttccacttgatcactgccttgttcggatgacacgacttgtccatgtcaatcagcacccagtagctgaggtgggcaccagcacaatgttttgccaactcacatcgccatggcagtagccgcgtccgtgccaataacccaatgctgtcagcatttggcgcagccagtccccaacttcgtccttcgtaggaagtcgcagatagccaattggggagagcgacacgaccaaactgccgtcttccgtctcaaccatcttctccacagtctgcagatgcgtcacagcactgccttctgagcttgattctcgcagcgtctggtagacgttgacgagtcgcgcgaggtcttccgtgccaggcgtaggtttgatcgttcgttcaaccactttatccagcaatatgatctgtcgcgccttgtttagatcagggacaaacggttggagcccacacggatatggtcgcttcgtcaacttgctcatctgatggagcacaaacgccaagttgtaaaacactttgagcgcgagatccttgtcgtcgaaaatgctgaagtcgaagagtgtcgatacacgacacgatcggtttgctctttcgattgccaccactcgcaaatgggctccggaggttgcgtagcccaaaacgaacggtaggtcgccgtagagcacctcattccacgcttgcatcttggaggtcaactcgtcaaccgacttattgatatcctccgaaatgtcgttctcctgtccacgcagcaggacgacaccgtggctctggagcagatagctcgggtgaatgtccaacttcgctcggtcaacatgggcccttccccttccaacaggaaagcccttggcccgacacatggaggttgtcattccgagcaatacgtcatagtagtattgccacatctcaaccgaggccgatgcatccggatgaacgcgtcaaatgatgggaaaacacttcatacacgcctcgaggtcgtcacacgagatgagtgggccattcggctcgaagaggccctcggactgtcgattcagcaagagcctgaacggcagcggcttctggaggagtgtgaccagttgatggacactggggaatgctcgtagctgcagctcggaatagtcccaagtctccgccagagatttctcgacgtggagtctctggcgcttcaaagcaggctcagaggtggtcgggagaaccaccagcacgtggacctcctcctgcttcgcttggaagtcctctccaaagtgcttggggttcttgatccatcgcccaggattcattggctcgaagccctgcagacgcccctcctcatcgagcgccacagctgccgcctcatccagactcagccacttgccgtcgtctcgcttcgccaggaagagctgcagatcgtccgcagggaactggtacatcttccgctccttgatcacgtcgtgtaggtcgctaaccagttggctgtcgtcgatggttacagcaaacacgcgtcccgctgcattaacaaccaggcagaagaacatcttcaccgccatctttcctcgagacggcagattgagaaatggcagcaccttgagtctagtgttttggttgtcggggttcagaatataggtaagctgattggcacgataaaatactgtcactaatgccggagacgaacgttagtgatggttttggtctttgtatgaaatggatgccacttcgtaaactgaacaacacgaatggatgctacttactgtacttctgcgcagtacagtcggtgtcggcataccgcactacaagccggtctaggcatcttctcaggcaagcgcggtgcgttggtgcgcgacgtgcgacttgagcgagtcgctggtggcagacacgtcggcttcggcgacggagaagtccgtgttgcgagccttggagaagccggcgtacatgcgctcgaactggagtcgcgcggactcagacgtcgacggcttcgcgttctcgaacgctgtctggacgtgcgctttggtgatcaagctggggtgttgttgaacagaagcaacagtgagtaggcgagttctttaccataaaacgttaagcatatatgtcgggacgaaccttgagccatcgccgttgagtttttcatgcacaagctccagctgtgctgagtacatgatctgtatgcaatcgacacgagaatgccactcggttagtaccaagcttcagtataatggcaatagctacgagtacgtaccgcttgcaagtcagctcctgaaaggtgcacacttttcggagcgctggcaatctcaggaaggtattcctgcgcctcgtccgagagctccatgtctttggagaccgcgcgaagaatatccaaacgctcctcctcattcggaaaacctgtagcaacgaagagcgtggtatggcatgagtacattgcagtcagccctgccttttgtcggcctaacgtaccgcagtatagtgacttgtccaagcgtccaggtcgaagaagagctgggtcgatcatatcaggtcggcttgtagcagccaacacgtagacaccctgttaccatagtaagtcgcactcagtaagtatccaatgcttcatctctggcaatgaaatgccaactacctttcgggcctccacgccgtccaagaaagtaagcagttggttcaccagacgatcagtgaccccagtgttatcggcaccgcggcggggagcgatcgagtcgaactcatcaaggaacagcactgacggagcagccgatccagcacgagcgaacagatcacggattgcttgctcactcgcaccgatgtacttgttgagaacctcggggcccttcacgctgatgaaattcaatccacattcatgcgccaccgcactagccaacagggttttgccgcatccaggagggccgtatagcagcattccagccgggagcttaatcggtgtgttgtcgtacagctttgcatagcgagtcgggagctccagggtatccttgagtactgttcgtacatgctgcaagcctccaacgtcactccacttgatggagctcttgaagagatcaaccccgatcagtgccgtcggctggaagtcctcaatcccctcgacgaagtcgctttgttgcaccttgtgacttacctccgaactgttgctgggttgaagcagagcgtgtcgcttgaacatttgatgcaaagcccgatccgtggcactggataaatcccgaaggctgtacccttctgtcaaggacgacagcaagccgaagtcaatggcggggtcaacgacaatttgcctcgactccttcgctcctttccccgtcgagtttgcgttgtcaatcttcatctgcagcatctcgcgaatcaaggtctcccgtcgctcagcgtccggcgatgttacttgaatggggcggtcgaagagcccgcagcctcgcaacgtcttgtggatgcttgtatcagatcgagcagcggcaacaacagccacgctcttgctctgcatcgcgttgccgacagtttcgaggagcttccttcttgcgttcttcttctgcgtctcggccaaacgcttgacagcttcacattcacgcttgaacgacgcgttcaactctgccgttgctctccacatccgctggcagttctggttcatcagcactaaaagaagctccgcgatacgtcgagattgttcgttggcagcacccgcagactcgtcctcttcgggcactagagcgtccagattatcgaagacaattaacgctggagcgtgagccgccgcttcttcaaacacgtcgttcagccgcgacttcaccgactccatcttgagtccgcgcaagtttcggcactctaccatcgtcgtaaaagctccaaatcttgacgatgtctgtacttcgtgtactaaggcccgcagcattgttgacttgccactgcctcgctctccatgcgccaaagcgtagccagggggtttcgttcccagcagtactcgcgcggctgaagcatctcgaaacagtacagggcgaacggccttcattagtgacgagtacgcctttgctccacgtgatagctccagaactgaaaggttcaacgcgctgactgatggagccttggagcgcatcttcactaagacttgctgttgggatccagctgcgttttgaacagtgacttggtttaacgataggatattgccgccgttgctcccacccagcacagtgtacttctctaacgccccgactggaacgcctacacgtatcgacataatcatcattagggcatccatccaagttacatcacagcactcgacaggacagtacctttcagttgctcagcgctaaaggtctcctctgtgtcatactggacctcaacaattgtatgaacaatttcgccactatccagctgaaggcgaagaaccgatccagagctcacgacatggctgcggtcggcggagctactccgccgcaaaaatgcctgctgaatgcggttcgccaagacagagtattcgccgtcagtaccatcgggaatggtgaacaacgtcaccgaagcagggggaagctccggcagcttcagcacgcgcaggtggacggattggttcgcagtgacgcccaggctagcacttgcaccttggttgagcaccacatgacctcggataacttcgtgggatgcctttagtttcgcaacatagcagcatgtcggttgagctctgttgttgcattgattcaatacaattattagtatgagatccattgcgtttaaacagctacatacaaacaacaacagagcacataccgtgggttttcaccttgctcgtttgattcaggagtcgtcctcgcaggagatttagattccgggctccacaacgcgactacaggagcttgttgggcatccgaaggagcatcggggatgattgcaccgtcgagcatagctagagtttctgggtggacccacagttcatcgaccgtatcgttttgtagtgtaccgatatcttcctgcaacagatagaagcgaaaacacatgatttagtgtaatgaatgctgtcttcttagtataacggtatcgcacctggacaagcagtggcgacgactgctcatagtacaaatcggggctcagaccgcgctcttgttcttgcacttggcgctctttgggggccacaatgacctcagatatcggcgtcaatcgcgcgtgctccctacaaaacccagaacaaagcattcagggtctatagcaaaatcccttgaacagcattgcactacgtacattccaacggggagagacgcgcggactcgaatgagcgtgttctggttgatccagatcggactcacttgcttgtcattgaccacacacatctgccatcgcaaccaacacagaacgaccctcatcaacaactgctccccttcccctcaaaagcaaaatgaaccacttcctacctgtcgcagcagttccgtctcgatagcgcccgcatgcagctgaatgagctcccagtcgtccggcgtgcagggctccacgttcacctgccgagcaatgggcagcgcgtccaccacatgaacgccaatgaacgtctgcggtgccttctccaggtgatcttgctgcacaaagacgcaatatacacagtcagcaccaccagcaccctcttttcccatccagagcctacagcctcaaaaacgcaccagcccaacacagcgcgccaactccgccggcacttcaaccacatcactgcaatgcaaatcaatgcagcaaccacacgcacccatagaagtcaattcaaagaaccctcgccattgtcatcagcgcgttcttcgcccacctccgcagcgctccgtccttgacgaggccgccgatccagcccacgcacacgcgctggacgtaaccgtccaccgtctcccacgacagctcgaggatcgtcgacccagcgcccacctgcagatagcgaataaaataaaatccacgagtgagtgacacaatgggagggatactggaggaggattgaggggacgagacgccaacgcacgagctcggggccgcccaggaaggtctgcacgaaggccggggggaggttcacgaagcagctgctcacgggcacgagcgccggcgccaggaacgccccgcgcgcagccatctctcaactctgtcggcgttgcagtttgggcaatgatgcatgcgtcaacgcacttggagggctccctgtcaaacctgctagagttcgtacttaaatgagactggtacaagttgaagtgggctggtacacgtacgtgtgcattgcagcatccgttacgccagctttgagttagtacatgtactgaaacggagaagaggggcaccagtattttgcaatcgactattgatatgcgcgaggaggaagccaagaaggcgtcattccgcagcgagtggacgagttgcgtgtccaagaagccggcgggatggcgcgcgcagtgcctcgagatcctgcacaaggagggaagactcacactgctgctcgtgatgctcggcatctccggtaagttcaaagctccctcaccgaaatggcaagcttcaatatgctgcacagacgcgctcacgggttgttatattgcagcctccctggtggacgacatcatcgacatggtcgtgctggggctgaatcgcactcgacgagagctcctgaaactcgctggctcgagcgacgccccctacgctgaactcgcagtctggggcgcgttcacgatcgtcgtggcgacggcgagcgtcaagtggacggcagtgttcgaccccatggcggcgggctccgggatccccgagatgaagagcatcatctcgtacgagcgccgcgaggacgccagcagatccctccgagcgcgtacgctggtgtccaagatcggtggactcgcactcgctctcggcagcggcgtatctctggggaaagagggaccgttcgtgcacacgtcgtcgatcatcgtccatcgactgatgaagcacttgaagtgtttcctccggatctacgacaacgacttcatgcgacgccacatgtacgacgtagcgtgtgccgtgggggtgaccacgacattccgagcacccatcggcggggcgctcttcgccatcgaagtcacgagtactgtgttcatggtgtcggtacgtaagacacggaggggtttcgccacgacaatccactgatctgccgtcacttttcacgttgtcgccgcagaattactggcgcgccttcgtagcttcgatcagtgccttgctagcccgtcaggccgtctacatggcgcatcaggactgggttgctgcacaccacgccatgttcgctacgaatttcgcgtccgagtcgttcgcgtttgctgagatcgtggcgttcgcggtgttggccgtcctcacaggcttcctaggcgcgttgttcgcctcggccgcaacagcgttccgactgcgttggaaggcttgggcagccggtaaatcggccgtgctggcatcctggacaatcctgttcccacttgcggcgatcctctgcttgccagtcggcatgacgcgcttgaccttcggcgatatcctgggcgatctcacgagttcagagtccaagctccctaatcgatggcatgccgatctgtcgacgtccgtgttcatcgtgctgcccctctcggggctcatccgcttggtcgtgacggcgatgtccttctccctgccagtccccacaggcgacttcattccgacattcatagctggggccaccttcggtcgattcttcggtgaggtccttcgacttgccttccccgccgctggaatcgtgccgggcggatacgcattggcaggaggagcgggttttgtcgcttcaactacaaacacaacatctgtcgcggtcatggcgctcgagttcacggggcagttcgtctacacgatcccgctcattctctcgacgctcatcgcttcaagtgttggctgcgcgctccgggtgtctgtctacgacagtgtcatcgccaaaaagggattcagccacgtgcgcacactggagctgcaggacctgaaagctcgcgacgtcatgctgcggcgattccctgctgttacgcttgaaatggtccgggcagagctcgagtgcgttctcaaggcaaccgcaacgaccacaacaagcttacctgtggtcgagaacctggacagtatgatgtttgttgggtgcatccgctgtaagggcattgaaaagttcatccggatgtcctcagatgccgaaaatggttcgagcctgcagcttcgcacagcgcttcagctccctgagcaggacgacgccacaatacctgcaacaaagcagccatccgaaaaagacgatggcatgcttgcagcctccgaggctaggcaaccggaacgagcgtcggcagtggaggaagtaaattctacctctgcaacctcaattgccagcgctgacaacagcccactagtagcctccgatcacttgacaacagcagaggaggccatcagcgggagcctgggcctcgtgatcgactccaccgcgcttcaagtggaccctgacacgtccctacaaaaggttcacctgctgtttgaaatgatcaagtgctcgagcatctgggtcacccggcgcggcaagctcgtcgggctgctacaccggcagaacctgcacgcccgcattgccgagctcaagcgaagagatgccttgtgagagtttgtccgtctttaccggctcgctccggacaccacctgccaaactgacctggcaaacaacacatgcacaatcgactattcaaatatatcgtggcaagacaaacgcacccaggtcgctccatatgcacgcgactggcccagcagtttcttggttgtttttggtttggcttcttacgctgcttgacatcttacttgacttgttcccgctcgctcgcgctcttgcccccaaaatcgataatgtaacactcctagaactgcatctctatcgagagcatcgaaaaaaattgcagaaagaagagaaaacagtgtttagatatgtactctcggtagcatgagtatagtacaaatacaagggggcgagcagcttcctgctgctatacagcttgctgccgctgcgatcatgaataactcaggaagctgccgctcgcccattcacgccacgcccgtggcgtcacaatgaccagtcaaagcatcacaaggctaacctgtagtgttgtggtgtcgtccgctcttcttggagtacgggtagcccagaatgttcagggattctcggctgtagccgctgctgcgctgcgacgcagacagatcggtgttctgcgccatcgggttggacgcgtagctgtcccgcgtcgaatagtccgtggccggtccactcggacgcgagctgtacgagtagttgtcctgcgcgggcggggcgttcgacctgccagactgcagtgccgtgttattcgacagcaacgacgcgttcgtgttgcgcggtgccgtcgacgcgtagctgtccgcgctcgagagcaccgacgcgttgttgtagcggctggactcgcggccattggacctcatcgagttctgcttgctcgggcggcgcaggctggtagctgggacgtagctctggggagacgtcaccgtgttggcgtacgggtcagcggcactgtacggctggtacgcctgcgagccaaaacgacgcgagtcgccgcccgtagacgtagcacgggcctcagactcccgcatgtcgtccacatcgaagcttgagcgttcctcgtcattctcgtcgtactggccgaaaccggaacccgaccgaggcacaaccggtgcagcgagcgtaggagcagccttgacgttcgacacagtggagcgacgagggctggtggccatgctgttactgtacgcgtacgtcgggggaacgtacacaggttcaggcgacggggtacggtccgagtcgtgcgaggacggaaccgacgagtggtccgacgcaacgggcgacgacagcgagtcgacagccatcgaggcagcgacaacagcagcggggacggcgttcaactcgggtgcaggcgcgtgcgagctcgtgtcactcaagtgcgagctggggcccttggagctggcagccggggagaacgactcggcgtagtccacggtcggcgaagcaggtcggtggttgtcgtcattgtccgaatggaaagtggaggcgcccgccggagcggccttcgccgtaggggacaggtactggttctccacgtcgttcgcagggtcggtcaggtccttggacgcacggttgcggcgtcggatgagaataaccgaccccacgataatgagcaacgcaccgactccgccgcaaatgccgccgataaccgctccgttggacgagctcgacgacgaactggtgtttccgtcgacaccgtccgccgtcgacgccgagttgaactgaacgctggacgtggcgcatccggacgtgctggtgaacgcaaacgtgccgttcagggtctcgccgtcgtccgacgtgaccgagaagtccaggttcttgtaccacgtgctggacgacgagcccgagttggccgagtacaggaagctcgccgacgtgctggtggcgttgacaccggcgatggtggcggccgtgatgaccttctgcgagttgtagaactgcagcggcacgtacgtggccgaggcgccctccatcagacacgccttgatgtcgcccgacatgagcgacgtggggcacgtgctgaacttgtacgagaccttggtgctcgagtcggtcgtctcgatgtccagcgccgtcatggcgtcggccgagagctcgagcgagcccgactcgcagccgtcgcacacgtccagcacgtaggccgtggtgctcttggtcgagtcgtcgtcgcgcgtgatggtgatgcagcgcgcgcaggcctcgttcagcgagtagtcggtgctgggcacggacgcgtagtacttgaaattgtcgctcgactcagagatgccctttaggcggcaggtgccgtacgtcgggtcgctgatgttgtagaccgacacggcgcccgaggcggcgcagagctccgcgagcgccgcggcggccgcggccagcgtccagcagctgcgcatggcgaaggtcgatggtcgatggacgagtggggcggaggcgcgtgagagggtccttcgggggcctgttgggttgtgtgaagaatgtaccgagctggacaagcaagccggtcggtccgtgggggagaagagggcagagatggggaggaatacgccgccgctggagctcgtgcgctcgctggcgttggtcactcgcttgctgtgcctctcgtctttgcgctgcgctttcggttgtgagtcggcaaccgcattcgatcgacgtcgaggcctgagctggctcctcaccgccggtcggggcggaatcgtgtgctgctgccaccgagcgcaaaaagaggcgcgtagggctcgggctccgaattatcctgtggggcacgcagtaactttatcgtttagttttgacaggttggtgggcggttaaatttgatcagtgaattcaaatcagagattatttacaactgttttatcgagggatacgatttcaaaaggggaaagtagatgagtatgctcgtcagctgcgtgagctaccgccaccggacgggtccgagtgggccgttgcagggattgtggtgaaaccagaccagcggttcataagatcgagggcttgcttgccaggcaaggcaagttgcctgggccacggatgtctgatcgataaggacgcgtcgtgttgccgtggcgcaaggtggcgctacgcaataagcgcccgctaatttggatttttgccgtctgagggcggcatcactgcgctcactgttgatcgctgcgcgctcgaccccgcgagcggcgcggacgactgacaggcggcagccgcagtttcgcagtgaactacaaaatgcgatgccgactggatcgcgctgcgcgtttgcagccagccagccagccaacaaggatctcaccgtcgccaactttttctgaaggtgcggctgggttcgagctcgcttcgtatagggctcagctcagctgaagcgagcagcctcctcttgacagatatcacaaggctcgcgctggcgcgcggatcgtgatcggctcgccgctgtcaggaatcaatcggcaaattttggctgggtccgccgggaccatgtccgcttggaaaagacttgcctttttctgtcgtctttccaccctgccgcgcgggactcgctcgctcaccttgagttgacaactcggccgtagatatcgtggcgcggcggcaattcgctcggcgtggccatcgctggtgagcgtcatcgacgctatgacaagcaagctggtttcggcggttgaagcttctgcagctgaatgcggcccgacggtggcaatcgtagttgatggcggcgcgttcgtggcctcggcggcgcgcagatggtcgccctgctcgagcggacgatttgctcgacacgctcgacagtggcagaggaaaactcctcgtcacgcgtgtgcaatgagcgtttcaaactgcagtacacactgcagccgaaaccgcaacacgtgctgaagcgatgacagctccgcatggttgccgtgacagccttcgaggcgcgagcgagatcggatgcgcttgtgagctatgactggccgtgcttgctcagtaattacataggctaagggcgtccttcggctttcggggtgccaacagcggcaccatcgagaggctctttcgagctcaagctcgcaaccgtgatgaccaaaaccctgattgtggctcccatcctgagctctacaccatcgttacaccacattgatgtggcaaacgccacgatctcattgcactatcggacaccatggctcgcgcactgctgctcctcgccgctgcgctcgccttcctggcgccgggcgccgcaggcaaccgccggttcgctgacgagctgccgcgatgggacttctggccgccgctcccgggaggcgcgcgcttcacaggcagatacctgtcctcggagccgggcggcatccacttgaagcgtcagagcttcgagcccggcgacctcttcgagctgcgcgaggacaagcccagctcgaatgcgctgctgtacggcagcgtgctgctggaccctgtcttcccggcggatgtgacgacagactcggccgttcaggccgcgttccgggccgccgtaaagtccatcaagacgcacgcgaacgtccacgtgtcgcccgagatcaaggtggcgcaagccaccgtattccccttgaagatcacgggcgacaacggcgagtcggagatgtccatcctgcttgacagcacggatgccaacggccagatgtaccgcttcacgagccacgtgacgttcggcttcaacttctacttgacgctggaagacgccaagttcaacttgaggcatcgggtcgtcgtggcgctggaccgggaagccgagcacaatgtctttcagcacacgttcggcccattagaagaagcggcagacgcggagacggacgaggcggttgagtgcggtctcgatggtgaagacgagtgctcggccgctccttccggaccgcgtatcttgtcgtacaatgtctggaacacgaacccttcgtcggacgtgtatggttcgggacgtcggtggccacagtatacgaagcgtctggaccacctcgtcaagtttgtgaatgaagcgcgggctggaatcatcggcttccaggaggtgcgctatgacggcgtattcggagagcctggtaaccacgcgcaagtgaagcatctcgctgatcgcctgcctggctatcaatacgtttatcaggcagctatgagctacttgaactcgagagtaccctacgagcggattgaagagggccctgcgatcttctccaagtatcctattgtctcgactgattatttattgctcagtcgcgatccgaacgacccgaacgactcgcaccagcggctgtgcctccacgctgtcatcgactatccgcagtggggagagatcgatgtgtacgtgacgcacctgtcgctgagcgagcgatccagggagcagaccaaggttgagatctgggagtacatgcgccaaggcaagggcaaaacgcaggtgcttcttggcgatctgaactccgaacctcagtctctcggtattcgcttcctcagtggtgaagccgagctgcttggccaaacaacggatatgaaagacgcgtggctggaagtgcatgaggaagctgagcctcggtcgacggatccgatagatcggcagcataagtttaccttccccagtgacagtccgtccaagcgtattgacttcgtgctgtatcgtggcgaaggaaaagtgaaggaatgcgagatcatcggccaggagcccacggaagataccaaggactacccagatgatgttggcatgcttcacccgtccagcccgatatatgcgtcggatcacagaggcgttgttgtcgagttccagtgaacgatgctagtcttgtccaagcgctgaaaaaaaaaacggtgacagcacagccgcttcgtgtacctgtggtgctcatggacgacttcgtcatgctggtgagttgatgtagattcattcgtgtgggccgcgccgcatatgctgatgctgacgtggatagaatttcgctggtcgaacacgaactacaggtgaaccgacccgatggcgctcacattttacatacttcgtaccgcctgctagagttctatgccgctgcttaccacccttcttttgtcgccttcaacgaggcctgcttgaacaaagccgtctgttcagcgagcaattcttcacgcgacgcagtcttcgaagccgccttgcgcgatgctatccgttccttctttttctgcaaaatgccgcggcgtcagtaaatggctttgcaatgtgcatacctttccattgctctaacctggttctccacgtccagcgatccctgcagctccttaatctcttcagcatatcgttgcatcccaaggttctgcagtcagtgcatgacaacatcagtatggtcacgatatatcgcctgcgtgccgaatgaagcctttgccaccctacctccagcgcggccgtcacgtgctcctgtgagatgcgatagttttccttcttcgcagcaccctccgccactctattggcctcttgtccaaccacctgcaggaactctgcagacgcaacaagcacacatcaatcatcaatcagcaacgatgcgctcccgagcatcgtatccaccacagccagcgactgtaccgccagcgcactcgttgacccaatcgatcgtctccttcgagatggccacgtcgtcccccaccacgtctctcaatagcttctcgatagctcctgcaaaatattcagtgcacacatacacgcagtcagccaaccctccatacacccacagcgcccatgcatcgcgccgcgccacctttgggtagggccatggtcgccaaaacgttgttgacagtcaagagctttcgaactcggctaattccgatttacagtcaggagtgatggtcttagaagtttccctcaacttcaacatcttctcgcaatggggcgccaggtggtgatcccgcagcgtagtgcgcactcaggcgcagagggcggcgcagcagccgatgccgacaagaaggaaggcgcgtactggagccgtgagctcgtggtcccgtccagaagccgccaggtgagtcgcttctggctcgagaaggcgctggtgctgaccgacggcgtgcagctcttcgcgctcatgtggcagctgtcgcagccctggccgtggcccgcgcgctggctggaggccactcgctgggtcaacgcgttcacgctcgacgtcttcagcttccgagccacgggcgccgccatgggctccacgtcgcagccgttctcgctctggggggagatgcccaactactggctctacgcgctcgtgtgggcgctggtgccgtggagcggcgtgctggcgctgcaaatggccaaacgctcgtgggccaggcagggcaggagcgactgtttgctgctcagtgtgacgtgggagaacgttctgctgcagataatgcagttcctatacgtgcccgtggggttggcggtgctacggctagtgaactgtgacgctgatggagcagtatccgtggaccctacgggaatgagctgcggaggacctggccatgtggctgcagtgcttctagtgacgtgtggcttgggtggcgggttcttggttggcttgccgtggatgttgcggcggtgcattcgtgactcgatggtgcatacgagcgtagagaagcacgaacggttcgtgagggggaaggagctcgagttcatattgggcacgtcggattcgtatttggagctgtctatgccgcagtttgcatcgttccggagacactcagtggagatgccggtgcagatgtgtctctcgaagctggcgctcatgttagatttctcggttttgcgatctccacctccttcaatggcgaaccagggaatacaaggctcgctctttgttatgggagtggtaactatggccgtgtacaggacgtggaggtatccgtatcgctgcaaatctacgtcgtatttggcgattttggtcgactggatgcttgtcgccaacggtgtattcggtaagatgacttgatttccttggccttgccagtgctgatcattaaccaaactattttactgggattttatctagtcttgctgtgtgcaaatggcgtccgcagcgcactcacagtttcaacatccgtgacctcgtcgttgacgttcctgaattcatgctttttagttgtgatcggcttggtggaactgcgggacatcatgctgttgagtctacattctgaacgctccaaaactattgagctgctttggccaacgaacgctcaaatgaaggaaatcgtcgagtttggtccgcaagtatcatcctgggtgaacacgattcataacgcacagaacgccattctcgcctcgctattggtgataccttcaatgcggtcctacgaagacttgaaaaaggcgcttgaccaagttgaaatctgctacgaagaagctgctcgaagcgaccatttgttgatggtacgtcatttcgtagtctgattgtctcctatttagtatattgaccctttatcctcagggccagctatacgagctctcgctttatgttaatgagctctatgtggaggcggtagcgtccagccctttccatcggaacggtagtccaacgacagagttagctgatctcactggtgtcctgcaacgccggaaagatcgacaagtgcttctttcgacacgaagccagcgtgtcctgaagaagctgcacattgctaggagctggtcacgtcagacacagtcatatgcatcggcaaacactgatcgaattcgaaatcacaacgcagtcggtgtccaggcatttttaaacgccgagtcgaataatcatgaagctgctgctgtggcagcgacagcggattggaggcctgtgaactctgtcttctgtttaaagtgcaatggctcgagtagcaagcaatctggactacttgtcacagttctagcgtggagtgagtcgctcggtttagttcggtggtgctcgatgcaagactcggttaatcatgaaaacttccaagaacagtatttttcgctgtcaaatgccaaacataacggaatctacggtgaactggtgtcatgcggagaagcgaaaagtagcgcagcgatattgcaggctctagaatctacgtcgaagctccaaacaatggtcgacgaaggagtgccgtctgatttgcttagcagtcgagcatcacaagagttaccaagtatcccagcgtttttataacaggttgttgattttaataaagcgacagaatggctttcaccaggatgttaccacagcacgtgacgaccaactgattctacaggtttgtcgtgggcttcaaagcaatagttccggccaaaaggaaggtgctagctgtccaagatgtattcggtggtggagaggcagaaagcgcacttggcgagccgttgtaggtactgtgaatgctcaatcgagtttgacgagacgatgtcggacgcagtaacttcgggtttgagcacccagacttcgtctttgaggcactaccgcagtaccgacgattgtagactgcagcgaaatcactccgaagaggggctgtgcgtatcgagcgctcctgcaactggaacaagttaatgctggatgcttggatggtcgccgtaggagaaccaaaatgctgaaagtatttatcggcgtcgaaagcgatcgatttgccgatgttgagatttataatttccatgtctcttttgcggtcgaaagcatcgtcaaagctttcaagtgagggtttgaaggtcgagtcagtagcctccgtggatgaagacattggcacgatttcatgaccggagaggatcgtccgaataatactgaatattcgaacatacgcgtcttgtgtaatttcctgaacccactgagagatatgccacaacaacattgccttacttagccctgtatagcgagataatacatttaacgtacttaccatttctgcaaagtataaaatggagcagcagaagcggttgaagtcaagactggaaaaggccgacgcatcgcgctgccacattttggccagaacggcgtcgtttgtctcttcatcccagcaaatggtcatctcgtacagcaacgtcgagtacatgctctcgtattcctcgcgcgacatggcatccggatctgcacgaggaaggagcttccaacaccttttcatttcctgcagagtccgtcggtggttgcgaatctgcgtgcgctggcgaagaaggtactcgtggaaatgctgcacttgctccatgttgtcatgtagcagtcaaccctgtttcagcgttgttccctggttaattcagactggtggccgtgaagatgcaagaccatagcgctgaccaacttcaagtgcatgatcagcttcctatagataggaaaagtgagtgcctcgtttagtgtattttcaggcatcactaggtttgcactgcagtcgggcaactcgtccaagcagtctggtgcaggaatgggtgaggcactggaagctgcagagcgagtccgagtcgtcgtccgagttcgacctcccaacgatcgcgagctccagcaaaattcatgtcaccatgtaagtttgtgttggttgagtgtcaggttcgtgtagccctctgacatgttgatcgacagacattgaatgtagacgacgaaggtgggcaagtgttcgtgtgcaagcgaaaatctgacaacgaagtagatcgcgaacttcgatacgcgtacgaccgcgtgttcaacgagaaagccgaccagggcgatgtgttcgactaccttcgtgacggtgttcagcaagtagcccaaggattcaactgcacaatttttgcgtacgggcagacaggaaccgggaaaacgcacacgatgctgtaagtaagcggtggttccgaaccaaaatgattctaaagacaggcgaaaaacttatcatttgtttgttcggtttgctgttttacaaagggggaacgaccttgagcaccatctcgatccagcaaccttagatcccgagacccccgagtgctctcctaactggggagtaatcccccgtgcgattgagagtttgtttgacgagcttcgttcgattagtcggcacggctcagctggtgtcgtccactgttcgtacatgcagatctacaacaacgacgtctacgacttgctccaggataacaagcagcgcatgaaagaccctttggctgtacgggaaatgataaagggcaatgggaagcagatctacgtgagcggactgtctgaattccgtgtcacgaatctccaagaaacgttgcagctactgaaggctggcaaccgaaatcggacgatccgtgcgacagcgtacaacgagaaaagtagtcggagtcacgcgcttttgcagctctcgatcgaagttgagtctcgtggtctggagagcgcgacgacaatcattcgacgtgcaaagctcaacctcgtggatttggctggctccgagaaatgggacacggacgttgtcatgggtagcgaccgcagcaaggagctaaccagcatcaaccagagtctgtcggctttgggcaatgtcatatcagcactcgtcaacccaaagcggacgcacatcccgtaccgtgactcgaaacttacacggttgctccaggacagtctcggaggcaacacccgcacggtagtgatcgctacaatctctccttccgaatctgctattgatgagacgatctccaccctccaattcgctgaccgcgccaagtgcgtgacggtccgcgtaaaagtaaacgagttggtggacgacgcaattttgctggcacaagcacaacgcgaaatttccaggctgaagctgttgctgaagcaaagcggttctcatcagcaggtagctgcgctcgaggagcaggtggcacggttgactaaagagaaggcagctcttgccgccgaaaaccaaaagcttcggcacgctgtctcgaatcttcgcaaggcgtcagcagtgcatacaactaataccgccgaagagaaggaagctccatcgactactaaacgtacgaaactgagtattgtagcacagcatcccagtccaccaactcatcgaaacatcgaccatgtcgatggtcgaccccactcatcgacgtcgtcattgcagctaaatcaactgcgcctcgaattgaaagcgctaggagctgaaacacgaacgaaacccgaggttttcacagcgtttgcggaccacgaccacggtgatgaagagaacgaacggttcgaacgagcagccaaggcccaagaacttattttgcaagagattcaaactgaacggcatgagctggaacggcagcttgagctcctgtctgccggtggtgacaatcaagatcgtgatcatgtagccgacaagactgaggagcagcctggccgaagagaagcagacccttgcccaatatgcgggaatgacatcgacgaccacagtgataccgagctcgatcgttgcatcgaagaggaaatgaacatggtcaaacagcagcgcgctgctgcactaaggccagagccgctgcttgaccgaactccatcggagaagaagattgttcagcaacgtccgaagacagacaacgtaactccggttcaaagtagagggcctggagttaaagccattcctcgttcagctgcgtctgacccgcgactccgtcgagtctccacctcagcgcatggcaaacctagcccatatctcacaaacgccgttcgaaagccctcgactcctccccaaacgagagttgctgcaaagccaaacattggagacaagggggtgaacgagggaaggctgaaagaagccttctcctccgatactcctgacgatggtgacagcaaccaagcagacagtcaagcgccatcgctatcaccaccacagcaggcacccattccaattctgcgccaaggacacaaaggtctgaaagccttgaagaaattccgtgcgtcgtctccatacagcgccgctgtacctcgaaaggagaagcgaacgatatccccaaaggcaaagcatgaagtatcagcagttccaagcagacttgaggcagaggctacccgtcctaccaacctcatcgtcaattcggtgcgagatatcgggctggagttgagcgtttacaagttccgatacgattgctggtacaactgcaccatcgtgggctttgaccggaaacggcgcatgcattgctgccaatacgactgcggtgacaagcagtggcaggacctctcggggcacaaggtcaaggtcatcggaagatccgacgactcgggctgagcgcgtagttgatcacacctaagacttctgtagagatgttgagcataatcataccgatgggtctatgtatttacttgccatacttatgacggtgaagagcaccaggcaagcgactcagcaccttgagccacggggtctcgacgatgatcatctcgctctccgcgacaaagtcgacgaacgacagggggcggtagcggttgaccacgcggcagaaaccgtcctccagctccaccagctcgccctcggcagcgtcgttcttgccgtcggagtcggtgccgacgctcatggcacgacgacgggccttcttgggcgggctcttggtggaagcgcccatgttgatctggtacagactctgctgcgagtacaggtacaggaagtccgggttggccgggtcgaacgtcatgcccttgaggctgcggccttccacgagctctttggggaactgctcgtggttctggcggtaccattccgagaggcccttggtctccacgtcgtagcacacgaagctgttggacacgagcgtcaccaccaaagtcttgcccgacgggttgaagcctatgttggtgtgcatctcgctggggcgaggcaggtggcagtagaactgcatcgagtcgaggttgtagatggcgaggttgttcgacgcgtcgcccgtggccagccactgtccgtccgaggaaatggtcagcgagacaagcggggacggctcactagcttccacctcgaatgtcttgagcacctccatcttggtcaggtccagcacgcgaatctggtgcgaagctgaggcgatgacgagacgagtcgagtcgggcgagaaggcgagtacgcgcgccggacccgccacactacgcggcaagttcgtgaccttcttgggcatgaagtcctgcgccatgttcagctcgaacagcttcagctcctgcgagttcgaacacgcaacgaaggcggcgctgggggctaacgctgagcacgacaagttcagcgccttgcccacgttcagctccagcagcagcttgtgtttcttcgtgacggcgccagtagcgctcgactgcgtggcgaggcgccacaagtccagcgacgtgggcttctgcaccatgagcacgcgctcctcgttggccagcgcaatggaacgcgggtacggcatggacgcgatcttggcgggtctggacacgttgaaggagttgccgcggtaccacacgagctgggtgtcgatgccgcccgagaccagaacggagttagtcccagccgagagcgcgagcgcgcgcacgtcgtgactgtgtccgcggtggctgtacgagtaggcccaggtgctgttgccgctctcggcgacggagcggcggaactcgacgacctggttgtccacaccggaggcgaagagcttgtcgttgttctggctcacgcagatggccaggatgtcggccgtcaggtgcgagaacttctgcagcagcgttcccgtgggcgcgttccagaagcagaggctaccggtggagtcgccgctcacgagcgtcaggtcgtccagcacctgcagcgcccagaccacggccttctgcttggccagcgtctcgagcgtgatccgcgactcgttgcggccagtggcggcgttccagcagtggatgatgccggcctcgctgccggagaagatcttgcccgccttggagtgccaggccagcgacacgacgcggccgcccgtggtcaggaaggccttgctgaagtgcagctggtcgtccgcgaacgagaagaggcggatgcggccgtcctcgcagcccacggccagctgctgcgtctcggcgtccagcaccatgctccacacggggccgccgttcgagtcggtcacgtgcttcttgcagagccgcgtcaggtccagctcccagagcgtgccgtccagggacgcggcgaacaggcgctcgctctcgggcgcccagcacagcgccgacacctgcgcctgcgctgagccggccaccacgaattgcaggtgccacttgctgcccacgcgccagatctccacgtcgccgttggcgcgcgccacggccaagcggtcgccgcccgggctgaagctgagtgcgtggatggcggccggcatccagtccacgaagcggcagcggtgcacctgcagcgtcgtgttggccttggtgctgtcgtcatcggccgcagcgggcgtggccttgcgcttcttggccaccgagttcttgggcgtcgtcatggcggcggcggagggtagcggggacgtcgaatgacacactggagctgctcgcttctattgcatacctgttggttggctgcgggggctttgttgcgctacgtatgttgcttcacgtatgttgctacagtaacacctccctaaatgaacccctctaactgaccatgtgttccctatctggttaggtcctcgactgcaaacgggattatatggatttcactataggtgttctataactgatcataaacctctttattctcttaatggtcgcaattgttggcgcctcaacccttagatccaaactcaaatattgttctcaatcacttgccagcctcctcccacgtatgtcattgctaccactactcccgccacaagaaatcgagcgaagagagaaattgtatttgggatgctaagttggaacaaagagtttgcagtaactgcaagcttgtgataaataagctagccacagtattttacaatcagcgcagcgtacatatatattttacgaaaaactaaaatattatgatgtcgagacaactaggggctatgcagtagataccaagcaaaagataaaactgcaggcatggtggcaggatatcgggacaacaaatattccaataacctcgctcacgtacaacctgaggggatgcgattctgctaataccaatgagaagaaagagtaggaacagacaataccgcgcctaccgttattggttgagttctgtttgtgtgaagacgaaacaaaacaagagtacgaaaatgctggaggggtaccaggtaaagaaagcccttgtgcacctaacatctgaaaatgtagccattagaagtgtagccatttctttatctgatcaattctttaactgaaacatcgtattagaccgagcgaactgggtgtcatttatagaggtgtcactgtacaggggtcacgatcccctaaacacgaacagctggtgtaatgtacataaaaagtactaccaaaagtactaccaccatttcgctcggtttcgtcggttttggtcggtataccgacgttcagcgctgaccgctgaattggtacaccggcaacaaggacagactaattttgaattcaacctaattatgaacattataaaaaaactcacaaaccagcgtgaaacctattgttttaatttttcgatgaactcatagaccagacttttgaaatcacataaacgatgtaactgcggtgaattattccaatttctttaatcagatgatacggaataggggagtgaagaagtagtatgcttaaaacagataaatttgttccgagaaggacaattgtaaacgttggtggggcctgaatacagctagagactggctagaatcgtggcactaacaacagacttactgtaaatatttttaacagactaattaggatgctgtcgatttctgcagtacacgaattggcctgggccagactaatgttgaagcgagactgattttgagccagactcaatactgtaggcactgtagacattatattgtaatgagacataacattgttttcccataattatactgatggttaatgcaataacaactcaaatattaaaatttatttcaaaaaatactttagaatgtcagcccattctaaacattttacttatggtataggatgctgattagttgtgttatctagtatcagtgcataaataatattgtgcgaaccggctaaaacgcccatctgtagcaaccccttattagacctcaatcacttaattaatcagagtacaaattagggctgaaatcgatcgtggtctagatgcatcgcttggctgcgtgattgcccagtaaaaggtgggcattctgctccaaacgcggctataccaaattgacttccataaaacaatcgcctaaactgcacattcactcacgtatgccgcagggcgcgatcgatttgtaaatcgatcgagttaaatcagggtgctaatcgatcggtttacgaccaaaattggcaaaagaagtggttttcacaataatacacacatcgataaaattgaattgtagaaatgtgttctcatcgctatacgtttttgttttccttacgtcacagaaaagctagttaacaaataattgctcttacaagacgttgggcaactacttttaaaattacaacgttgtttttaccaatccaaatgctataccgggaaagaaaacaagaagaaatctatttttggaaacaaaaatcagatcatttttacgctaatttgagcaccaaaatttggtttttcaaaattgatcgatagatctcgctgcgatttttcgattcatatacgtttttagcaccagaagagtactccgcgccaagatgtgggcatttgaaaatttgaatttttaaatgtcgattaagttcaagttttactattgactgtctaagagtaatatttggcgctgaacacgaatatacactcggtttcgcccaatgatgcgtggaacaccttcaaatatgaagataaagataagttcgcatgaccgcggatgataacgaagtgactacagaattttcataaatatacatatggtactatcgtttcgttacggtcgcgctcacttgaaccagaatttctcaccttctatcgcaccgattggggagattaatggctcaaaatgatcctcttctgacaacacttccccctcttttcgtccctgcagcagatagttcgttttaccgctgctggcgcgccgcgcatgctaggcgttctgtttcaggttcgcacttgggatgaggatttgtgattgtgaatgtgaaaataaaaccagctttttctcagcgcttcacttatgtccgatttcaaggttaaaaatttgattggccctagcaaaaaactcaaaatggtggataagtatgatttggttttgcgtggtctcaaatgagaaagaccaaagtaatatttctgtgtggtacagtatcaatatcatcttgtaagaacatgttatgtagcaagctcaatacttacgctgatttttaccgagcaaggataaaatatttggtacgatatacgataggtacaattcccccgtgatggtaattgttttcgactaggtatgcaaattaaaaatacattactcagcactatttgtaatggatctactttggctcactactttagcttacacgtatgcgcacgtgtatgaggaagcgtaggttttttttccttgagttaagtatactcgagatccacgagtatactttaaacaagataaagactccaagtagcgggttttggtaaaagatgagaactgctatttttgtttaatgtttctgacttcctctaaatgtaatattctaaactaggaatctgccaacggctggttggcaggattctgctaacatgcaagtcactcattggctaaaagatgctgctttcagccaataggaatcctaaatgtgtatggaccacccgtcgtggtggtcgtaaatgtatgtagcatttggtgtatctacaccaaggtcgagaaagtctttcgaacctctaacagacgtcgtgtctgttagagttacaagtgactgtagccacttgtgcgtgtaaccctgttacaccatcccccctcaaggttagacgcgccgagtcaatcaggaaattgaccactggtcaattcttcacgttgggagaaagaaaactcgatctcattccgcaatgagctcgcctcagaagaagaccgccgctgcagcagaggagaaggcctccgccgggatagagaccatatctgtccctcagtacttcaagcgtcaggaagcaaagcgttacgctcttgctgccaaggctacggcggggacaactcagccggagattgtcctcgaaggctcctctgtagacaacgacgccgttgactacgggaacggcgacgtggagatggaagagggcgagacctcatcaagcaggcgcaagaagtctatcgacagcgatagtctcgacccgcacgccgggtcgagacgccctcgtgaaggagataactcgggcgcttcgaggtcgaagcgttcgcgcggcgagagcgacactccgctctctgctgctgaggctttaagtaacccgcgtgatgtggcgccttcaagttctccgcgcgctgctcaggcaacgcgcgatccgtggatgccgtctgcgtcagagatcgcagaccgcgtgagcaacaccgtgcctccaaatgaaatcccgctgtacgtatgcagcggcatccacgacgatgctgtaccgggggagcagtactttgatccgttaacgaatcaaaggcgcgattactacatcggactcttccacgagctccggtacttctccagcaagaatacttcttctcgcagcaaagtgcctgccgctcaggcactttgtcaaagttggaatgcttttgttgagaactttaacaagaaaccggctgcttactgcgagcgggttaaccctttagtgatcaatattatacttggtttttgtatactgaagtccctatagtaaagtgtaaaatatgcataaatgcttggttttgcgccgcaccccgcagcataatatatcattttgcagggatttaccaataattattgcaattattgttgtagaacctcgcaatatgcttggtttacgcaagtgatataataggtcaaaatcaatagagaggtgatttgattggataaaatttgtaaaaccaagcatattgcaaggtttcaggaccaccaaccacaatagggttaagcatgcccgtgaacgctttgggacgttctcgacgcgcgggcggctggagcagctccacagatcttctgtggacgctggtatatttcatgcgctgtgcccgaaggccaacagtgcacgctgtgctttccgggtgcggcgcgcttgagcgatcgcgacttaaacgggtacacgacgtttcgtgtacctgctagtctcaaggatctccgtgccaagttcctggcacgcgaggaacgcgacgatcgtgggacttcgggcgctgcaggtgactacagcgttcgcactaccttcgcgccgacagtgcgtggtgagcttcgcacgccctcaccatttccggaacgtactgcagcagaacgtcctgcagcagaacatcccgcggcaggacgtcccgccgctcccatgtatcttggtgggtcggaaaccctctccaacgaatacgataactgtaacggggttacacgcacaagtggctacagtcacttgttactctaacagatgcgatgtctgttagaggtttgaacacttcctcgaccttggtgtaaggtacaccaatggctacatacatttacgaccaccacgacgggtggtccatacacatttaggattcctattggctgaaagcagcatcttttagccaatgagtgacttgcatgttagcagaatcctgccaaccagccgttggcagattcctagtttagaatattacatttagaggaagtcagaaacattaaacaaaaatagcagttctcatcttttaccaaaacccgctacttggagtctttatcttgtttaaagtatactcgtggatctcgagtatacttaactcaaggaaaaaaacctacgcttcctcatacacctgcgcatacgtgtaagtcgtagtagtgagccaaggtaggcctattacacctggtagcactttgtagtccgtccaacgaccgactacctgaacgttcgtacggagctgtacgaacgaggagccgagaaccttttcatgagcgcggaggtgcccatggaaagctccactttgcctgcaactcatgttgcacgcgctgaatgcctccacctgtcggatccagagtgggaggcactccaacgactgtcaacagtcatcggggaggcggcagtagctgggatgctgcgtacgctatcgccgacagagcaacatggtgttgctctggggttcatcatgaaggagcagcgtgatgctgcttcctctaccacggtggcgtcagagacgacaccgcgtggccaatcgttgaagctaaacgtgagcaactatgtcggaagagagggcgagcctctcctccgttggcttgtcgaactcgacactgccatcgcggctcgacgtatcgtcgacccgttgtctaaggttgcgttcgccatgtcatgccttggcggacgagcgagaagttgggcgtatggacgccgactctctgatcctacgtgcttcagcacgtaggagggtttcaaagagaagctcaggcaagcgtttgagccccccccaaaatgagtttcggtcgagggcagagttcctcgacctatagcagggtaaccttgtcatcttgaacgtgtcttcgaagagagagagcaactctcttcgtgctttggttgattcgggcacgtcgaacaactttgttcgactaccaagtctattaaggcttgacttcgaggtatcttcacatatgaagatcaagagtttgtcgagacctttatcgtcctggatctggacgataagtttgacattgtattgggcatgccgtggcttgcacggcatgatccgggcatcgattgggagaagcgcactctcgtgcgcttcggtcgcgacagcggaaccgtgagcgatggccctgttgccgctacgcacgcaccgacaggtgagcgcgactccccactcgagacagcgcctaatgccgctgttccggagcaccctgggcgcgcgcgagcacgcgcgcaagagcagcaagcgtcggcgtcgccgccgacggctgaaggagaaaacgtgttgatctcggagatcgacacccgcttttcagcgaatcaggaagagtctccaacctcaaggggcacggatgacgcaggcgagtcacacgcttcagccgtggaggctgacgcgaatctgattggatcagttttggccaataataagagccaaggtgacgaaacgccgtcgactccggaagtcgatggcttgggtgaatttgattcgtcggctccgggagctgacgcaccctccgtaacgggggtctccgccaatggttggcgtcgaggtattgaagtcgcatcgactccgggagtcgatagcttggacgaatttgattcgtcggctcggggagccgacgcaccctccgtaatggagggctccgccaataacaggcgtcgaggtaaggagagcgtgtcgactccgggagtcgatgctgcaagcggtgcggacggttgcaaacgtcccgcaccggaaaaacttgcaccgataccgcgacaagatgtcatcatcgattcgatggccaggagcactatctacagtgctcttgatctgcgcgatgggttctatcagatcctcatgcgtgagagcgatatccctctcacggcagtgagcacgccgagcggcatgctctgggagtggctagtgatgccgcagggcctgaagaacgcccctgcgaccttcaacaggtgcgtgacgcacttgttgcgctcggtgcgcgacttcgcaccgagctacttcgacgatgtgttcgtccacagccgggctgcggacgggatgagcgatgttgagatgcccaaggtgcatctccggaagctgcttgcgctcatgcgcaagcacaagctctatgcaaacctgaagaagtgcatcttcggggtgagcgagatacccgtgctcgggtgtctcgttgggaagaacggtgtccgccctgaccctgagaaggtcagagtggtcaatgagtggccgacgccgtcgaacgtcaaggaactgcggcagttccttggcttggccacgtacttgtgtaagtacgtgaaggactacgcgggtatgatacgcccgctgtcccagctcctgaagaaagacgccgagtgggtttggactgctgagtgtcagcaggccttcggtgcagtcaagcggggcttgactgaggcgacgatcttggcggtggccgaccaagatcgcccattccacgttgtgtgacgcatccgacttcgcaatcggatgtgcgttgatgcagcacgatcacgagggccgtgatcatgtcgtctactaccaatcgcgtcagctgaagccagctgagcgcaactacccggtacatgacaaggagctccttgccatgaagtacgcactcgcgaagttccgagtgtatctactcggaagcaaaccgttcgtggtctatacggaccacgcgtcgctgcggacggctgtgaagtcgccgcacatctcgcaacggatggcgagatggctctcattcttcgcagagtataaaatccgggttgagtacaaacccggaagactcaatgtggtggccgacgcgctcttgcgtcgacctgactacgccacgactgatgccgacgtcaatgccattgacgccatgcgatcgagcacccatacgtcgtcactgttggacgacgtgaaggtcgcgtacgcgcacgacgcggacgcgaagctcttgctggcctatggctcagcgccttctgacaaagctcgtcagaagctgccgaagcatcttcgtgctcgtgcacaccgttatcggctgcacgacgggttattactctacagtgcagtcgacgacaacgcggaccgcgttgtcgtacccaatgaccatgacctgcgactcaggatcatgtattagtatcacgatgcaccgactgcggggcatccgggccgtgagaagacataccttcttctcacgcgggacttctactgggcccaccagtataaatgggtgcgcaagtacgtccgtgcttgcgaggtttgtcaacgtgtgaagcctgcgcctttcgcgcaggctcccttgcagtcactaccaagtccacgggagtgttggcagtccatgtctttggacttcgtgttcggccttcccccggacagccaggggaacacgggcgttgtggcctttgttgaccgcttcagcaagatggtacatcttgctaccgtacccgctgaagtgactgcgaaacagacggcgcgtctgttcgttgacatggtgttcaaacgccatggcacgccgatcgacatcgtgtcggatcgagacccgtgcttcactgcacacctttggcaagaagtgcttacgctcgctcgttccaacactggagcgagtgcctgccgatggcggagttcgccatcaacaactcggcgcatgcctcgaccgggcatacaccgttctacgtgaatgccatcaggcacccacgcctcccaagtctactcgggacggtggctccttccttaaccctttagctacgaggcttcgtacgggtccagtctgacctatacgacagctcataattgactacaattggccacaacacatcgtacgggctaggtagaagctcgcagagtcagccaacaggtccaagcggaactgtaccatagccacatgtgagcaaatcaacaagcttgcgcgtaccgatataagactcgggcagattctcttctattctacaactatcgagcggcaaatcacacgaaaaccaaaatccataagtacaggtttgttgaggggttgacgagagctgccattggtctaaatggagcgtgtctgcgcagggcacagacaccacgaagaccaacgcagaggcagggcctactgctggaagcgagctgaacgagttcagctcggacgcaattcacttcgtacagcgcagacaagccgtcattcggtttgtccaggacgctatcgcagcttctgtggaccgacagaagctgaacgcagacaatgttggcaggggtaacacaaacgaattcaagaagggttcattagttttgttagctacgcaaaacctgtctaaacatgcagtttccgacttcggggcgagcaagctcgctccgcgcttcatcgggccgttcacagtgctggtacggcacgacaacgcctacacactggacataccgtctagtatgcgcctccatccaacgttctacgtcggacggctgaagccatacctgaagcacgagctacctagttcggctgaaccgaagcagaagactcggcggaagccgtcatcctctccagtgtgaagtcgcgctggagcagcgggtcgggctaatggtccagctcggccggaacgatcaaggcggtctgggaggccggcacaacctgatgatacttcagatcgccaaacctagcgctctggaactactccacgaccggaactcggtcgtggggagacgcgagatcagggtcaacaccaagttgaccacacacggggcgtgttttcaccaccaccgtcgccgattcgtgatgcacacggctcaactcgatggattgttgagcggattgttgatcacagtatctcgagaacgaacaggcaaccagttcgttttcgtactcgttggagaggatttcctcccaaccaagatacatgggagccacggaacgtcttgctccaagacgttccagacttggtgagggcatacgaagcccacatactggaacgtaatgcgagcgctgctgttaacagcagcgcccgaagacacttcgagggcagacataggtacctgcccccgcggcaacgacgcggttcgcacgttgccgcgcatgctactcagcagctgagaggttctccgctgttgcgccagcggtcttcaacttcgacgcgctcgttccattacgagctcgctctcttcaacgtcacgcattgaccaagcggtcaatggtggttgacgtgccgggaccggcatatctaaccttgacggggggatggtgtaacggggttacacgcacaagtggctacagtcacttgttactctaacagatgcgatgtctgttagaggtttgaacacttcctcgaccttggtgtaaggtacaccaatggctacacacatttacgaccaccacgacgggtggtccatacacatttaggattcctattggctgaaagcagtatcttttagccaatgagtgacttgcatgttagcagaatcctgccaaccagccgttggcagattcctagtttagaatattaaattttagaggaagtcagaaacattaaacaaaaatagcagttctcatcttttaccaaaacccgctacttggagtctttatcttgtttaaagtatactcgtggatctcgagtatacttaactcaaggaaaaaaacctacgcttcctcatacacctgcgcatacgtgtaagtcgtagtagtgagccaaggtaggcccattacagtcgtcgactgcactgtagagtaataacccgtcgtgcagccgataacggtgtgcacgagcacgaagatgcttcggcagcttctgacgagctttgtcagaaggcgctgagccataggccagcaagagcttcgcgtccgcgtcatgcgcgtacgcgaccttcacgtcgtccaacagtgacgacgtatgggtgcttgatcgcatggcgtcaatggcattgacgtcggcatcagtcgtggcgtagtcaggtcgacgcaagagcgcgtcggccaccacattgagtcttccgggtttgtactcaacccggaatttatactctgcgaagaatgagagccatctcgccatccgttgcgagatgtgcggcgacttcacagccgtccgcagcgacgcgtggtccgtatagaccacgaacggtttgcttccgagtagatacactcggaacttcgcgagtgcgtacttcatggcaaggagctccttgtcatgtaccgggtagttgcgctcagctggcttcagctgacgcgattggtagtagacgacatgatcacggccctcgtgatcgtgctgcatcaacgcacatccgattgcgaagtcggatgcgtcacacaacgtggaatgggcgatcttggtcggccaccgccaagatcgtcgcctcagtcaagccccgcttgactgcaccgaaggcctgctgacactcagcagtccaaacccactcggcgtctttcttcaggagctgggacagcgggcgtatcatacccgcgtagtccttcacgtacttacacaagtacgtggccaagccaaggaactgccgcagttccttgacgttcgacggcgtcggccactcattgaccactctgaccttctcagggtcagggcggacaccgttcttcccaacgagacacccgagcacgggtatctcgctcaccccgaagatgcacttcttcaggtttgcatagagcttgtgcttgcgcatgagcgcaagcagcttccggagatgcaccttgggcatctcaacatcgctcatcccgtccgcagcccggctgtggacgaacacatcgtcgaagtagctcggtgcgaagtcgcgcaccgagcgcaacaagtgcgtcacgcacctgttgaaggtcgcaggggcgttcttcaggccctgcggcatcactagccactcccagagcatgccgctcggcgtgctcactgccgtgagagggatatcgctctcacgcatgaggatctgatagaacccatcgcgcagatcaagagcactgtagatagtgctcctggccatcgaatcgatgatgacatcttgtcgcggtatcggtgcaagtttttccggtgcgggacgtttgcaaccgtccgcaccgcttgcagcatcgactcccggagtcgacacgctctccttacctcgacgcctgttattggcggagccctccattacggagggtgcgtcggctccccgagccgacgaatcaaattcgtccaagctatcgactcccggagtcgatgcgacttcaatacctcgacgccaaccattggcggagacccccgttacggagggtgcgtcagctcccggagccgacgaatcaaattcacccaagccatcgacttccggagtcgacggcgtttcgtcaccttggctcttattattggccaaaactgatccaatcagattcgcgtcagcctccacggctgaagcgtgtgactcgcctgcgtcatccgtgccccttgaggttggagactcttcctgattcgctgaaaagcgggtgtcgatctccgagatcaacacgttttctccttcagccgtcggcggcgacgccgacgcttgctgctcttgcgcgcgtgctcgcgcgcgcccagggtgctccggaacagcggcattaggcgctttctcgagtggggagtcgcgctcacctgtcggtgcgtgcgtagcggcaacagggccatcgctcacggttccgctgtcgcgaccgaagcgcacgagagtgcgcttctcccaatcgatgcccggatcatgccgtgcaagccacggcatgcccaatacaatgtcaaacttatcgtccggatccaggacgataagtttctcgtagaagggtctcgtcttcaacgagtcccagctctgctcctcaaagcgctctttcttcgtcttcgcactgagagggtcctcacgctcagtggtgctctccatgaataactgcctcagttcttcattctcgctctttgttctctcggcgtccgagataatgcatatttgctcgatgcgtccatcgtgtaagtcacacgcgaagcgcttccagctcatgactgaaagcgaagtcaaccccgacgcttgcgccggagggttagcgagagccatctccctgtaccggaacccagcacaggtacgcgtcaagacgatgaacgtctcgacgtccggcttctcagcctccgtctgcccggaagacatttcttgtagtgtctcggccccaggccgagacttgcgcagcgatcttcgcatgcgtcgtcttcttgttttgcggagcccggctccgcttggttcttgacctcgtccaggcccagccgtggacacctcggtcgggctagcatcagctctggcgtgaccccctacagctgcctcgtcccccaccgacgccccgcgagttgccaacgtgaccgaaggcgcgggcgttggcgacggtggagcgctggcgcttggcggcggtgttggcggcgagctggaaccctcttcaacgggaactgccggcgggggagtctcggtcgccccagcagcagactcaggactacttggaggagccggtggagggtcgaccgaggtctcggaggcggcaggaaggagcgcagggtcgcctgcaggcgcggccgaggctggaggcacagtaccagcggcgataggagtggtggcacccgccgaacgagcctggcgtgccggacgacgaagtgtcggtggtgacatcaacagctccctgagacgatcaagaaagagatcgagtcaacaacgaggatccgaatcacagtgagaagcggcaggagcaacgagcgtaccggtccggagcactaaagagcccgaaggacagcggcagccgtatcggcaaatgcacgcgacggaggagccatggagtcgaagaaccgaggacgcctagacgctcaccagcgtggcggactcgcgtcgaggcgggggcggttgtggtattagaaagtggcagtttccaacgctgttgacccgccagcccgacaatcaagttcaatcaaggggcaagcaaggcaaggtcaagcgagaaacggagatggctgcttctgattggatgatgacattatcctcggtagagtgacaggcagtggccgaagcctcgtcgggtcctaatagaaccccgaacgaggcttcatggtacccactttcaggtacagatgcatttagttacgtacttcgaccgcacttattagtgtggccgcggtcgtcatttgatgtatccggaatcaccttattgcggtcgttcacactagatatttgtataggaacataggacgcatcataggatgaccagaacgaggccccagggcctcagaaaactcagtaataaaaagacagtcttcccccaaagccaacaagggtcaagtccgacttcggtaagtgtcgctagcttattgtagtgcctggacacgctcggctgcgtgtggatgtctgtcggggagcttatcgtgcattgaccgagagtttccttggcagcgccaagcgttggcgtggccggagaggcaggaacggttttagagtaccgttcagtgtatatttgtggggttagagtgtccctgagacctaccgaggttttaccttggtccctctgtataaggcaacacgccggtacccttattttctgagggactgtagcggggttgcgcgaaagcgctacatagtatcctagccttagctcgtggctagcggtacaggtttttgggttgaccgaagacaacctaaggtgcactgaggcgcttgcaaccgacccggtgtaagggatcgttcctggtattcaggttttgatccaataagcgcttacctttgcgggttagcgtgttgttggtgtctctaatatcttatggtagaagagaattttagtggtattgccacaccacatcagcgcgttgtgtccgagcattagcttcaagtggctacgctaccggatgtggtcaacgtgtgcaaaacctccacgaggcgccagcgcgctgtgtccgagcattagttttaagtgggatagcttcacgtcgtggacataaagcgtggctgagattggtggtcatattgtgaccatgtatggaggcgtggtttgtatgtgtgtgtatcaatctctacttacatgcaaaagcgttctagcagctatttgtgtttggaagcacggtacgggtaggttccaagaacccgacggctcctgcctgaatcctcgcaccaatagcggtgtccggacgaccggatagtagtgaaagctgggctctacaggcttcaacactcgcgaggaaactgtgaggaacgagtgatcgccatctcgcgttttcttcgtgcttgctcggctcacaaaaaccggaatgataaggtcagctccgttgttacctcgtgcaaacactcctgcagctcgatgtcccagcaaaaaaaaacacagcgtttcttccgttggcctcttgtggcaactgcacaaaatgaagatcaggtcaacgatatactttagtttcagctattaatgctacttgcaagtgacacggcgctcgaacttaaacgcaaagtgcaggaacacctcaagggaaaggagttcgacttccctctacacgataatccattttgcatgaagtggacgctaatcgtcatcccctcgagcggcatggcaaagtttggaacctcttcaaagaggttgctgcagattacccccagatgagtcacgggacatctcaattggtataggagaggtttgcaagaggcataggctcggcgttgatgtatcacacatgtgactatggggcggtaaggaacaaatgtttcaagcatggtggtggtctgcggtgtgcattccaagactgcgaatcgagggcaccagcgtggctggtgcgcagacacagtggtgcagcgcagtgttcaaccaaagtgtggtgtagggaacatcaagttttgtgtcacactccacggccgcagtggaacaacgtaccaggagccaagtactactcggcgggatgaccgtccgccgagctcagtgggcaagaatgcgctggtggacgaccgctgaactcggctgatggtgtcagaaactcaaggcacaccggcttcgacctggtgacacgtggcaggcccagtgatgaagacccagccgagttcaggaaggcactggacacactcagccgagatcatggggagttcaagccgccgagctcggctaaacggtaccatgtaccgtccgatacggtaaccaggctcaattgagtccgggagtcgcgcagtcgagttcacgggtcgctccgccgagttcgcgggtcgctccgccgagttcactgggttatccggctcagccgagttcaccggcttatccggacactttatccggctcagccgagttcgaagagttatccggacgccttatccggaccagccgagctcaagcgtcgctgcgctcagcgaagggtcggccgagatccaaaaccacccactttcatttggtatttgtataggatcttaggaatagtagaggcgccccttcagggcgcccgacagagataacaaccaaacagagcagaattttctaggtccacaacacgtgcacgcgcttccagtaagtccctgcacgggccggattatgtctgctgtcagcacccgagaggcatagcttgtagggtgttgactggtagcgccaagagattaagggcggcccgggttgggcgctgtctcgccaagcgcgaaggaaaagtctcgccaccgcagcgagccggtgttcccgtacgtcccgggcactgattgctgagtcgagaagcctttgctctcggcgacccgtaaaagcctgcgagggccgtcgtccgtcctttggcggagggcacgggatttctaattccggagtcaggtaactcagctggcttccgtgattgactggcttggggtacttggtctcggcgaggacgagacatcactgtcccggaagggccgaaccgctggggtacatctcagcgcaggccaacatgggccgactagctcggctgttgttgtgtttgtagctacggtgccacatctgacgattttgtgcgtgctactacaccacaactggtgccgcgacctgggagcagggtggtttgttttcgttggtaccaagtcaaccaagtttcgagtactgagcaagatggtcaaggggagatctttgccgagctgggccagcccagcgacggctgggggttcgcttcacacgaagccgaactcagctggcggaaggatcgccgacatgacgatggaagcggtcccaaccgttcggtttggcaacatccgcacccaagaccgatgaagagatggaaatatcggagattatgatgaagaatggaagaaagccgagttgctcagcggggtagctgagttctcgctgcatgttgggcgcatggagaaaccttgacgagcccaacaaaacctcgcagccgagctcggtgacgatgcggacgacgacagtcaagccgtcgctccaggggaccgtccgcccctgatacaacgagcgacgagggcatccagcgcgaaatgcccgagttgggattcgatgccgaacgtctcgtgggaaacctttccattcgactaggggcaatcgaataaatgtgaaacccgtctgcaaatggtgcaagttgcagatgcggtctaaggctattgcaccaaagtgatgatccgccgacttagggaagacagcaggctgggtcgagtcgaagaatgatactgcgtcaactgtatggattatatgaattacatgatatcgaaatggagtgagcgaagatggagctggaaagcaagaagcccattcgccgggttagcgttggagtcggcgcgaagtctcagccgagttgccgagctgagcggttaagcccagctggcctgacaacgacccagtgaagaagctaaggaaggtgatggtgcgtctgcacagattgagcgagtcagccgtcgatgccgaagctgtgttgactcgtcactgggtccgtgaacacgctacccactggggcactgtgtgtgatatgcggcggtacgatcgacacccttgggaacgaccgccgggacctccgaccaagtcgatgaacgatcttcccgttgtgcgctcaagctgaattggagcgcaggtgtgctgacgcggagctgtgctgatatggagccacgctcaagcaggaaagccgaagcgaagtcgagttcgcacgatgttccagtgaggtcgtaatcactccatgttaccgagaggcggctagccgagtcggnnnnnnnnnnnnnnnnnnnnnnnnnnnnnnnnnnnnnnnnnnnnnnnnnnnnnnnnnnnnnnnnnnnnnnnnnnnnnnnnnnnnnnnnnnnnnnnnnnnncgagaggcggctagccgagtcggtcgatgcgcggcggcggtgaacaaaccgaagttgcagcaaagctggacttgagcaaatctcagcggaggcacgctgggcaggcgcgtcgccgagaatgtcgacgtgccagcgatctcgaacgggagccgagttgatccgtagctgagcagaagcagacacctgctttgaagatggactccgacttaactcgatccgacgtagggctaccatcgagtttatctgcggtcagcctgaagccgagtcggtgaaatcgccgagtcacggcgtcgcaaaggtgtacccatcatccaaagctggactgaagaggaatggattccacgcggccgcggtcgtattcacattgagccaccatgagcagagcttggttaggggtcgagcatagccaagtcgaaacaccccttcaaagcgctgatacttccgcttgcctctcaccttgctcatctgggctaagctgaagcggaatcaattccaggtgaacatgagtcgcgctagacccgggttgattcgtggcagagccacagaacatggggatcaagtggcgcctaggcgaattgcagcagaggtttgtcttgaatccgagctgaatcgggatcaggtacaagtgccgccgaggtcagcaccaactgagttgaaccacagtcaagctgaagccgagatgcgttcaagcagagccgagttgaagcgagacagtgcactctgcgtggaagtagtttgacaccgagatgtcgtgaagccgagttcaaccaagccggaacggagccgagttcgagtaacgcttcgaagaagcgctggtcgttggagtggagctgattgaagaggaaccttgctgaagcaaagccacgatcaagttgggccgcttcgcgtccagttccagtgggaacgcatacatctcgcgcttctcgtcggattccagccgagacgaactaggtcgagccgacgttatgcgcagccgagtccgagcagagctgagctgaagcgaggctgagatcacgctgcgtcctaatgtggtcgcgttcgcactgggttgctgcgaagccgagaacattggagtacgatcaagctggaatgggatgccgagttccagtagtgccacgggttggatggcgccaatctgaagtgtactcacttcaacggaaggaaacactgggctgagttgcggtcaacgaaggaaacactgggctgagttgcggtacgccgagtttcagtgagatcgcgttcggaagttcgcctagttgagtgctggtaaacgcaccatgttccgattggagagcgctcatgccgagttcgaggtgtagccgagctgaggctgaacacgcttcacagctgaaccgaagagactgaactcaaactgagtttgaacgcagccgagctcgcggcgagccgagttggaatgtgaccgaatgaagtaatgttccagtcgagcttgcccaccaccatcccaaccaagctgagcccagtcggggtaagctagtctaacagagcgggagacatgccgaagtcaaggtccgttgaccactgaacccagctcggcccgttcagaacaactcgactggagcatcaaacgcatcaggatcgccttgttcggctataaaatgacacagcaacggtgagagctaactcaacgcaccaaagtgagtggggcaaacacttaccaggctagttgagccgatcaagcggaggttgtgttcaaatccagccgagttcaaggtcagcggatagcagctagtcgtcaggacagccgagttcggacacagactagttcaacttgctgctgcacttctcgccaataagctcagctggggtggatttcgagctcagcgcggcccgatcggggaagcgtttcttgacccgccgagttcccggtgccttgtagcatgccaagacaactatcaggctccactcgacgcaccgaaacgagaggcacgtgcttaccgggtcagccgagtcgctggcagcatccatggctgctcattttgacggaaacagagatgctcagcttcgtcggtattgcagccaatcgagcacttccccgacacctgcatcacctactcgctttgctgcggcagacccaacatcaccgctagtactccgagcttcgacaggggtaccagctgacttcgtatggttcagtccctactaccggctgccacgccgagaccaccatccaggttgattcgctgctgaagtgatccgacgacggggttggtgcgagcgataggggcacctacatgtgtacagacccatgaggcgcggagtctacgcatcagacaaggcctataccaaagatcaaggctcaagcaagtctcaccttcacggaacaagggcgtcgagctggcgttgcgggcgtttctggccactcgaattcgggaaatgtgaactcagagtgtttgggacagatcggattggtcgaaatcaagcgtgcgacacatccagtcggccaggccactcaccactccggctcgtagcatggccggggcagttgtggtgtagggaacatcaagttttgtgtcacactccacggccgcagtggaacaacgtaccaggagccaagtactactcggcgggatgaccgtccgccgagctcagtgggcaagaatgcgctggtggacgaccgctgaactcggctgatggtgtcagaaactcaggcacaccggcttcgacctggtgacacgtggcaggcccagtgatgaagacccagccgagttcaggaaggcactggacacactcagccgagatcatggggagttcaagccgccgagctcggctaaacggtaccatgtaccgtccgatacggtaaccaggctcaattgagtccgggagtcgcgcagtcgagttcacgggtcgctccgccgagttcgcgggtcgctccgccgagttcactgggttatccggctcagccgagttcaccggcttatccggacactttatccggctcagccgagttcgaagagttatccggacgccttatccggaccagccgagctcaagcgtcgctgcgctcagcgaagggtcggccgagatccaaaaccacccactttcatttggtatttgtataggatcttaggaatagtagaggcgccccttcagggcgcccgacagagataacaaccaaacagagcagaattttctaggtccacaacacgtgcacgcgcttccagtaagtccctgcacgggccggattatgtctgctgtcagcacccgagaggcatagcttgtagggtgttgactggtagcgccaagagattaagggcggcccgggttgggcgctgtctcgccaagcgcgaaggaaaagtctcgccaccgcagcgagccggtgttcccgtacgtcccgggcactgattgctgagtcgagaagcctttgctctcggcgacccgtaaaagcctgcgagggccgtcgtccgtcctttggcggagggcacgggatttctaattccggagtcaggtaactcagctggcttccgtgattgactggcttggggtacttggtctcggcgaggacgagacatcactgtcccggaagggccgaaccgctggggtacatctcagcgcaggccaacatgggccgactagctcggctgttgttgtgtttgtagctacggtgccacatctgacgattttgtgcgtgctaccaaaccacaagagactgtgagccgcagacgtattggcgtgggttgtgcagatagcacggtagatgtctgctgtgctgagtctgtccggatgggattttgccgtcgacatggtggatattgcttcgttgtgcacgatgatgcatcgcaagcgtcctaaatgtcttaaaaacctgaaacgtcggcgttcctaaagggcggagtttatgttaagaaagtaaaccggtttttaggatgccttctaggattatgtttaggacatgtcctaaaaccttggctctagcaagagtgttatgctttccacgtagcaaatatactctatatatagatatataaatgtaagcaaatcccgagtaatgtccaaaacgttttaattaggagtgctaggacgtatatctttaattaccgcttcaaattcgtaatttatgcgagtatcatttcggtttttcttagaacaatttgggacatttagagtcattttaaaaatttccacaccgcgtgaaaggctatcacaacgggcgtatggatcgaaaacgtaattccaatacggaataacggattattgcagtcttcagctttccgtaaaacgtgatattattccagtaatagcaatagtggaatttcaccagattacgatcgttgaaacactacaatgccgatttagagcccagcatgtcttattttatagttaatgcatctcaataatacaaattagtatttaagttactgttacgggaacgcaagaaatggaaccacggatattttttataagattcttagtacccatttttataattttccgaaccctacacgcagaatgctccaaaaagcagtcacaggcttaaccccagtccaactttgtccttaggaaaatggaccaaattggtttttggtgtggcgtacataagccgatttgtcctacctcgtcggtaggacaaaaaatgacttgacatttgtatgcccgccttatggcccaagaagaatagagactgtcgcttctaacaaatcacgcatttgtatcggagctaaaaatagcagtgtccatactcagatccagtcaaaacctcaaatttgtcctagcagcaagtcaaagtgatatgttattagagacaattttcaaattgcctttatgtctacaaggacaatcgattaagtgaagctgatccgtcaacagagagattaaggaaagggtttctgcccatgctaagaaaacttcatattcatgtgtcgttttatgacagcagggcgccaaagttttggtcctttcgtttgtcctaggaaccatctgaggggggttagcctagggctgacaagatctacactttcttcaactagtggtttgccagagacgcgaaggtggagtttcgctgggccaacagctccgcgggcgatccgaactcggccacctggccagcgtccatgaccgcgattttgttgcagtgcatgatcgtgtggatgcggtgggtgatgatcagcaccgtcttggacgcgaaggtctctcagatggtggcctggatgaggctgtcggtggtcgtgtccacgttggcggtggcctcgtctagcacgacgatcttgctgttcttgagcagtgcgcagccgatgcagaggagctggcgctggccgacggacaggttgtcaccgcactcggacgtcaagacccgccccccatttctcgagagtagcggccatgtgaacctgcttcatcaccgtccagatctcagcgtccgagtactctccgaacaagtccagattctctcgcagcgggccactgaagagcacggggtcctgcgggataatggcgaggctccgtcgtagatcgtgtagtctggcgtcccggacgtcaacgccatcgattgtgatggtcccggtctcgaactcgcagatgcggaagagtgcgatcatcaacgagctcttgccggccccagtgcgtccgcaaatccccaccttctcaccaccagcaactctcatgttgacaccccgcagcacaagtggcagctccggacgatacttgaggtggaggttgtcgaacgtgatcgcaccctgcgatggccacaggtcgctgttgatcggaagcttggccgatgaatcttcttcctcttgagggatctcgcggaagtggagaatgcgctcaacactggtcatcgcgttgtccgtgcggtcaacgtcgcgcactgaggactgcacgatcgaggtcaacatgagcgcgtagacgagagaaatcccagagagcaaggtgccgagctgccccttggtggccaccaggtacagcgacaccacgaatatgaccacgaccgagagcgtgtcgagccgcaccgccagccaacgacccgctgcccagtagataaagaagaacgaagcattctcatccacagcacgcgcgttcatcgcctcgaacgtggcttgcatcctgaaggcacgaatcgtctggaccccattcaacgtctcacccagcaggttgtacactggcgaccgcgagattccttcgaggcgcttcacctcccgcgacgttttcttgaagtagaaccccgtcacgacgagtgctgcgaccacggggatgtatgaaaggccgatccaatacgacgccaaagcgcacacgatgaatccccccacgctcaacgaaacattctgaacgaagttctgccattgctgcggcagcaacgagtccatctgatccagatcgtttgagaaccggttgaggattctccccacgggtgtcacgtcgaagtacgtgttcactggggcggcaagtacacgtcgaaagagctcgtcatgcaagttcttggagctgcgaagcaacagaagcatgacggtgatgctgcggcagacggttgcgagcgctccaaaggcgatgaagccaaagtaccagagaccaaaccacgtggccgaattggacgaatctggatcacgcatgttgctggcccagtacgcctgccaccagttcacgacaacaagcagcccctggctgattgaataccccagaacaacgatcgtcacgaccatgaatgcaccgaagcccgtctcgtcaaggtacatcttgtacacgtagccggtcactcggcctttcacgcggtcttccttctccacaagttcatcgttaggtttcgcgtcacgtccactggcttaggcagcagcaatttgttcaggctttccacttgcttctggctcgattgatgaacatggctcaatgtaatgagtcggtttgtcgagagatgccaactcaggaaaccgagcaacgatatcagcgtagtttccttgaccagcaattcgtccgtgctgtagaaccacaattttgtccgcgtggacaagcagatcgtagtgactattaaccaccagcacacgggttttgagtctggcgaggcccaggatgcactcttcgaagatggcatttgccacatgagggtcaacagcactcaatggatcgtcaagcatgaggatgtccgagttctgtcggtaaagtgctcgagcgacactcacacgggctttttgtcctccactcaagttgatccctcgttctccgatctctgtgcggtccccactaggcagtgcagccaaatccaaagccaattgagacgcccgaaggacgctctcgtagcgctcgtcgtcgaattctccctcaaatacgatgttgtcgcgcaaagttgcgtttcgaatccaggcttcctggctcacgtacgagatatcgccctgaatgtccatactgccggctgtcttccgcatctcaccgagcaatgcctgcagcaaactagacttccctgaaccaaccgggccgacaaccatcacaagagctccggcgtcaatgtggaggttgatttcttcgaggctgaaacctttcacggctctcgtatcacaggcgatgttgccctccttctctccgtcgtcagctactgacgtgggccaacaatactgagtgtcgtcgatcgaaatgcttcctcttggaagagagtcatcgtcaacacgaccactcgtgggggtgacgatctccagttcggtgctgtccaaaaactcgtcgatccgatgacacgccaccgctgactgggacagatcggcgatgcccaacgggaacgcgttgacgccttggcggctaacgttgatgacggcgatgagcgtgaacgcctggatcactgagaagctgcctcggtacacgacatagacgcccaccgtcacaccggccaggaacgtgggaacagcagcgcggagttgagaatctgcagaaagtggaagcggcggtagcgcttaacctcttctcgacgaatcttctccactcttgtcgccacggactcgttccaggggtagagcttggtcactcagatgccctgaagcgcttcggacgtcacgcgaagacgctcctcagtcacggggagaagctcgcgccgagctcttccaatccgcttggccaggttgaacgaagtggccagcaccacgatcaacagcacgagaccagcaagagcagcgatagggtcgaacaacactccgatcaacactacagtggcggtgaacccacccacgggccattcatcatgccgttgaatacccggtcaatgtcgacgctcacgagcgtcatgatctcgccggaggaatacttctgacgcgcctcgctcgagagccgcagggacttgcggtagactgtgtccagcagcagttaatgcatattgacgcccactcgagacgagataaaccaggcgaagttgaagctcatcatggacacgaaggccacgagcgacagcagaaccaccagaacgtagccgttctcgataccgaagacattgtcgcggtcgttgatgtagtccaagatggcctcgacgaagaaggacatgagggccgagccagcgatgaagatgaggtcgctcgcgaacacgacagcgatctcgcgtggaaaggtcctcaccaatgccagagcgacacgtggaatgcccaacgacgtagacgtctccttgttgctgctgatagagagaagctcgcgctcgaacttcagacgcagcacctcggacgtgtcttcggggcacatggcccacacgtcctctcgctccaaggcgcgcttggcaccgagagagatcagcggctgcagccacaccatgctcaccatggagaggaaggaggccgagcggatcgggttcacttgctctcggaaaggcttcggcgggtcttcagcggtcgacttgggcgtctgcgtgccagcgacaaagggttggtgctccgccatggctgctggaagtgcgttgcaggcagacggcggattgaacaatgactgctgaggcttgcgtccccgggctcgatgcgacccagcggctcttgcctcttgcaacgctagttgaacccgcgtcaacgtttgcgcaaatcgctgtaaatcgggaggacgtctgaggacgccattgcgcaaacgcagatggacgttattgtccggatgcggcgaaccatgaaattattcgaggaactcggtttggctatgttatttcatgtgcgcgggaagtgtcctggagccctgccacggtgactatggcatgcaacgggcacagtcaccgcgggtgaagaaatatataaagttgagctttgttctcgcactcgttaactcggtctctgttgttgtgtgactgactctactgccccatggccgccttctgggaactacctttgcgaatggccttggcggtcggcgggaagccctgcacatccacggcgtcggcgtctcggcagaaggctggcaaccacttggccgacaggcagcgcagtatcgcgcgcagcggcatggagccggcgcccaggccgattgagatgccccactggcccgccgtcagcggctcgcagttgaagaaggcgcctgtgcactgcacgatgagcaactgcatggcgatctgcagcagcgtcacgtagatgtagacatggttgcccatcaggccctcgaagatgttggcctcgtcgtggatcttgcggcagttgagctcgttgaagagctgcatccacacgaacgtgttgaagatgacggtcatgtgctgcgtgggctcgtgcttgacgtcgtcggccaggtcctggaagcggcccgatgggatgttcaggatcttctcgcccacgaacgtgagcatgagcaggatcacgagctggtagatggactggccgatgatgtgcttggtcatgatcttggacagcagcggcttcgtcttcgggtacggtcgtcgctcaagcagtgcgggcgtgggcggctccgtggccaatgccagcgacgcgaatgagtccatgatgaggttcacccagagcagctgaacggcagtgagcggggactgctccaggatcacagcgcccaggaaggcgagagtgatggccacgacgttcaccgtgagctggaacatgaggaacttggcgatcgagtcgtagacgttgcggccccacttgatggcgctcacgatggacgtgaagttgtcgtccataaggatgatgtccgaggcgtctttggccacagccgtgccgctgatgcccatggcaaaacccacgttggccttcttcagagcgggggcgtcgttcgtgccatcacccgtaacagcaacgacttgcgggccgtagggcatgagattcgactgcatgaggcccgtgacaagcgtgtacttgtccttgggagacgaccgcgccatgacacgcagaagcggccagatcttgtcgaactcggactggatgatgttgccgttgccgtccagcacgcgcgtgcggaactcctgcccttcaatgaccaacgagccatcgcccggcgagatgatgccgcacttgccagcgatggagcgggccgtggtgatgttgtcacccgtgaccatgcgcacgatgatgccagcacgatggcagagcttgatcgagtccggtacctccttgcgcacggggtcttcaatgcccacaatggcgatgcaggtcaagtccttctcgatgtcgtcatcggcccactgactgatctcctcggccgaggtctcgacgtcgcgataggacaggcaaagtgtacggaagccctgggacgcgtacttctcgatgatagacgtgccgatgatctccttctgggtcgggtctagtgaggccacggagccatccagacgcttcatcttgctgcagaggcccagcaccacttccgtcgcacctttcgtgtagatccggcaagtcgacgccgaccgcttgaccacgaccgacatgcgcttcttcttgctgctgaacgtcagcatgtggccgacctctgtgttggcgcgcacgctcgggtagtcgacgccgcagtcgcgtacgaactgcagcagtgcgcactcggtcttgttgcccgtgtgctcgggctggccacccgcgaccttggccgggaggatttcagcggtcgagttgatgcacacgccgttgcagaagacgtcgcgcgtagactcggacatttcatcggtggcctgcgaggccgaggtgaactcctggcctccgatccagatctgcatgacggtcatgcggttggtcgtgagcgtgccggtcttgtcggaacaaattgtcgtggcgctgcccatggtctcacacgcgtccaagtgccgcacgaggttgttgtccgtcagcatcttcttgaccgaataggccagtgagatggtcaccgcaagcggcagaccctcagggatggccaccaccagcaccgtgatggccacgatgaagaactgcaggtattcgctgacgtacttggccttccactcggacttatcgctgccggtgaacgtatccaccgagaagcggatcgacatgatgatgaacaccagaagcgcgacggtcgtgccgagcttgccgatgagaatggtcagccggttcagcttggcctcgagcggtgactgggtttcgccgttgtcgtactcctccttctgctccacggtgccattcgcagccttcggtgggtcggggagtgacgtcgtcgctgcgggcgatggggtgggtttcttctcggcctccttggctttctccttgtccttctccttgccgagaatcagcttcttgataatgcctgcctgagagttctcgcccacgcacacaaccagcatcttgcccagcccctccatgaccttggtacccgaaagcaggaacgggttttcggtgttcttgaccatcagatccgactcgcccgtcatggccgactcgtccagcttgagctccttctggtcgaacacgatcccgtccgccgggacgatatcaccgaggtcgacacgaacgacatcccccaccacgaggccgaacttgctcacctcggccggcaccccattgcgaataactttaatcttctcgtcctccttgacggcgttcagcgcgcggaactgtgcctccttctggtagtcgttgatagctgtcaccatggtcaccaccaacactgcgaaaataatacaagcgccttcgatccaacctgtatccgggtggtcgcccacagtcactgcgaggatgactgagaggatgcccgagattgtcagtacgataatcgtcatgtcctggaaggcttcccacatgagctcgaacagcgtcttggccttcggtggagcaatgtagttggacccgaacgtgtcttcccgccgcttcaggtcggcgctgtcgttgttgttgaggccctgtgtgatatcgactcctattgacgccgcgacgcctgtgatgccccctaacttggctagctgctcggcctggtgctcatgctgcgtctcgatgagtcggatcaagtcaccggtgacgagtttgaactggccgccgcccttgggctgctccgagtgaatcatggccccccacccggctgactacctgctagcaaatagcaggcagggtgtggccccgatcgatctcgtcccgttgtccgcctcgctctatcggtggctcagggacgtgtcctatttcctcctgccagctcggctccagcggcgtgggtgggtcctcgtcggtcttaagtcttcgtattcgtgaagcgagctctctcgtttctcccggcggccggggtttttcggaaatgctcgcacgtcccgacttgggccggtggttacgggtcaggaccagtctggtcacgaggcgaggccatgcgattggaggctccgcgacaagtcacgcgtggcggggcaaggcgagtaccaaattaggatggaggaaaccaatgctggaaaccccttggaaggttggaattcgggactataaatatgagagcaacgcgtaaggtgccttcacatcgcatcgcatgaccttcgttgccttggcagccttcatggagctatttccgcggacggtcttcctccctccgcgtctgagcgatatgttgagcccaatttccagcacagctcgactaaagcaagtgggatcgtgccggccaaaattatcgccgtctcggcgcgaagagaagatctgatctcaccacacgccttcaagtcatggttggattgctgtatgatgcagtgaaaatgacgacgataaggactccaggaagcgtctgcatcttgcgagccaaatcgattggccaacttcaaccagttcccgagtcggacactcggttccgatttcactaccattcataaagcttgaaatcaacggtataataccctcggtaaaataccctttggggtgggtaagcgtggtgctcctacagttttctagcgacaagcaccaagtaggtaaagcaacaaaaacgcatcgagaggtttacttcaattcgaaacgcttggccagtgacgcgaagatagattcaggctgggacagcaactccgcgggcgatccgaactcggccacctggccagcgtccatgaccgcgattttgttgcagtgcatgatcgtgtggatgcggtggctgatgatcagcaccgtcttggacgcgaaggtctctcagatggtggcctggatgaggctgtcggtggtcgtgtccacgttggcggtggcctcgtctagcacgacgatcttgctgttcttgagcagtgcgcagccgatgcagaggagctggcgctggccgacggacaggttgtcaccgcactcggacgtcaagacccgccccccatttctcgagagtagcggccatgtgaacctgcttcatcaccgtccagatctcagcgtccgagtactctccgaacgggtccagattctctcgcagcgggccactgaagagcacgggtcctgcaggatgatggccaggctgcgacggaggtcgtgtagcttcaagctcgaaatgtcgaggctgtcgatggtcaccctgccgctctcgaactcacagatgcggaacagcgcgatcatgagcgagctctggccggcacccgtgcgtccacagatgccaaccttctcaccaccacggatgtccatgctcacgccacgaagcacgaggggcagctccggtcggtacttgaggcataggttgtcgaacttgatggcgccctgtgaaggccacaccgacgaattgatcggcgtgcagtccggagcgtccacttcttgcgggatctggcggaagtacagcaatcgctccacactcgtcatggcgctgtcgacacgatcaaaggatcgcaggacccactgaatcacggacgtcaacatgagcgagtacgtgagcgagatgcctgccgtcatggggttcagttggcccttggtcgacactaagtaagccgtgacgacaacgataatgacgacggagagcatatcgagccgcgctgcgagccaacggccggcggcccagaacgtgatgtacatgttggcgttctcatccaccaccttcttgttcatgcgctcgaaagtggcctgcatcttgaaggcgcggatggtctgcagcccggagagcgtctcgctgaagaggttgtacgcgggcgtgcgggtcacgccctcgagacgcttgacttcgcagctcgttttcttgacgaattggcccgtgacgaagaagatggcgatgatggggatgtaagccaccgcgatccagtagctcgcgaacgctgacaccactaacgagcccaaggccatcgacgagtgctgcactacgagctggtagtcctttggcagtgacgagtccagttgatcgagatcgttggagaagcggttgagcacgcgcccaacgggggtcacgtcgaagtaccggttcactggcgccgccagcactcgacggaacaggtcgttgtgcagattcttggacgtacgcacgcagctctctgtcaagaagagagcgcgaccaagtgtcatcaacgtggccaatatgatcaggcccacgtaccaccacgcgtaagtctcgcccgaatacgtcggatcaacaccccgacgaggcatgttcttggcccagtggctaggccaccagtccaccaccacacgcacggcctgactgacggtgtagaacaccacgatgaggaagataaccacgaacccgttgagacccgattcgtcgaagtatgtcttgtagacgcccatgttcacggttcccttcactcggtcctccgcctggataagctggccaccagtttctctagcatcttcagccttcggttcatctgtggacttctccaccaccgcggccacagcctccgccggaattttctcaatgtctggcagagcgtcttccaatgtaaggtcatcgccgtcaccagtacgtgcagccgctgcattgggtgtggccgcagttccaggtgatatcccaaggtcagggaacatcgcaagtacctcttcatatgttccttcgccagcaatggcgccgtcacggaccaccagcaccttgtctgcctgtgacagcagatcgtagtgactattgagcactagaattcgggtcctcgatctggccaggcccatgacgcattcgtcgaagataccgtgcgctacatgggggtccaccgcgctcaatgggtcgtccagcagaaggatctcgtaatgcgatcgatacaaggcgcgggcgatggccacgcgcgccttctgtctgccgctgaggttgatgcctcgctcgccaatttccgtttgatcaccgtgaggcaacgcgtgcaagtccatcgccagttgagagaccctcaacacggtatcatagcgctcagtgtcgaacggctcgccaaacaggatgttgtcacgcacgttcaagttgcggatccaagtgtcctggctgacgtaggaaatgccgcctcggatatcaaagctgccgcgtttcagtgtcatctcgcccagcagcgcgtttatcatgctcgacttgccggcccccacagtgccgatcaccatcccgagtgagcccgggtcgatctccaagttcacgccctccagtcggaagctcttctgctctcgctcatggtcactgtcctcgcgtcgactccaaatccagtgttaacaacactgggagtgcttagattgaagctgactctcgcactgcgatccaggtcgaacatgatttccgagacctcatcaggagcaggcgtgacgacaacgacgtcgggcgtgtttctgagcactggccactcaaagttggcctcacgtacggaaatgccaccgacagggacaacagcagtcccgtggccgtggttcgagtcatcctcgagcaacgctgggccatactcgtcgctcgaaaggtacgagccaattcgagcgaaggcgatccgggcgtgcgagcatgctgcaatcgtaacaggcaactgaatcagcgcggttcggcagatatttaccatcgcgatgagcgtgaacgcatcgatgaccgagatggtcccgttgatggccacgtagattccgagtgtgacgcccgagaggaaggccggcgtgaggaacagcatgacgttgttggccacctggcacaagtggaacttgcgcagcagtgcgatctccttggctcggatcttctcaacgcgatgcgctagtgattcctcccatgcgtagaacttcatgacgcggatgccctgaagcgcctcggacgtgaccttgacgcgctcgtcgatgacggtcaacaagtcgtgcttgatctggaatggcgtctactgcctttcctgacctacaagatgactgagcaaccaagtgcacgaaagtctggtcgcttcgtttggaaggcactgccaactgatttgtcggcactttgaagagctggacatcaacgcagagttagttgcctcgatacttcaacgcttggggtttgccaaacccacaatgcctgcacgtcagacttggattccacggattcaatttgtaagctgtcgttatttgtagttagcagaacggctatcgatcgacaaccaacgtaatttccttccttcactctatcaacagcaatatggagagagttacatgtagcacagccattgatgataccgaagacgcggttgttgttgcggtcgttggcctgtagtccaagatgacctccgacttgagtggctgggaggcgatgatgccttcacgacagcgatttcgcgtcagagcgacgcctggagcgaggcgttgtttcccactggtggcctatgtggccttgctcaaaagccaggggcttgcggcgtccattgcgacgcctgccaaatttcggattactcacccggttatgcccgaacacgccaaagattcgcagcggcgtgtaacaaaacctggcaccttcagctgaaggcgaatgcttcagccgatataagagctcaagatgcttaatcctgcatacacataagtcagctcacagtgtagtcggtcattgctggcaggctggatgtccccgccaagcagtgcagcatgagatgagtatgtactggatcttactgctgcagtgacacacgtcgctatcccgggtgggaaaccataccgacttcctccgcttgtagtggacaacctcatataagagagcccaatcatatcacaggatttggagggccttctcgactccgcttataagttccacacaaatcattccgatacgtttccaccggtaatatatcggtgcgatggagcttccattcatttcacgcagctacggctgcagcctagagctacctggacgcggttgctgccagtacccactacctatgctagtgttaagcgctgctgcggcacacgtatactatacagacgttcggagagtggtttgcttgcatcacgctgttcccatcgaccaatgacacatgttaccgagttagactttaataaaaagtttacttcaaaaatgttctaaagccagggcaaagcattgcaacggcactagcctcacgcgggcgcgtgttgctcaaggctttgcagtggcagcctgttgcctgccgcgaggtgtcaagcgcgacaggctcgctcaggcggctagcggcgttgtaccaataaagtgagcaaagcgcaaaaaagtggcagctaatcgacaactggtaccggtacctgtatcggtatataccctgtccactataagcggaggaagtcagtaagaatacacaatgttccgccaaaatcccatgtccttaaaccccgggataccactctcttaacaatgcacgcctcaccattggcggaaatccacgtcggaaaagccgcgctcgcggccaatcgcactcctgctgacagccctaaccgtcacatttcacggcattcggatatttcggacctcgcgggcgatcgcagtctccggccgacggaggagaagcacaactcacttcacttcttctccgttccccgacctgtccggacccggcccgacgacaatggtgcagttcgccaagaagctggcggcggcgcagcggcccgagtggaaggggtgagtcccaagtcgcgcgtggcctatcggatcggatggtagatagagagagagagagagctaatgcgtgatctctcgcgatgtgttgcaggcactacctggagtacaagcagctgaagaagaagctgcgcaaggtggtggaggccaagcgcgaggagacgcgcgatgagcaggagaacttcaagcacgcgctggactcggaggtggagcgcgtggtgctcttcttcctgaccaagcagggcgagttcgccacgacgctgcagggcctgcgcgcgcagcagcaggagctggcgcccggggacctggaggccatgcactccatcgccgacatgtaccgccacgtgggggacgacctcgtgaagctgctgcacttcgtggagctgaacgcgacgggcatccgcaagatcctcaagaagcacgacaagacgctcaaagagcacaagatcatgggctcgtatctgtcgtcgcgcacggactcgcaggcctcgcacttgcagcagctctaccacgatgagggcatctcggccatcatcgccagcatccgctcggcgctgaccaagctgcgcaagctcgaggtgcagctggcggcggacgcgaccagcaagacgctgacgcgcaccatctccgaggacgagcccgtgctcaatcgcatcggccaggcgcggcgcagactgcacaagtcgacgcagtacgtcaagacggtggccgcgcgctcgctgatcttcgactcagagtcgtcggaggacgaggatgacgagacgtacgacatgctcaagcggctgaagcaggcgtcggagccctcgcgactgctgaacatgctcaacacgttcctgtacatgaccaactactacatcgtggcgccgacgagtggcaagtacgcggctgagctcggagcggaggcttccatgagcggtgtcattgtgggtatgacacccgtggcctcgcttgccagtgcagtgctgtacagttggtgggccaaccgatcctacaaggcttcgctgagttttgccaccgtgtgccttatcctcggcaacctgctctacggtatggctctttcatacgacagtgtcgcgatggcccttacgggtcgtatgctcaacggttttggtggcgctcgcgcgattaaccgccggtacattgctgataactactctcgggaagaacgcacgcaggcttcggctctgttcgtgactgcaagcgcgcttggcatggccgcaggacccggactggctgctgcgctgcattaccttcccgactacaacgttgctggcatcgatatcacgacggagacctcgcctggctgggtcatgtttgcgctgtggacgatctatctcatcgctctgttgttttggttcgcggagcccgatcgcatggagagggagcgctttctggagcgcaggcgatccatgctggagaacggaatgggcaactcgagtatcgcggcagtggcggctgaaatgggcgagaccacgcctctgatttcgcgctctacgtcgatggttggcagcccgccgccgctgtcgtcgctgtggtacaacgtgccggtggtggcttcgctcttgatctacatcgttctcaagctggtgctggagtgcctgatcacggccagttcgacgatcgccatgtaccacttcaattggggctccactaacaacggtctgtaccttgcagcgttgggacttctgatgttcccgaccaacatggtcgtgggctggatgagtttccggtacgaagaccgagagctgattattctttcagaggctgcaatggtcgtcggtgtgggtatcatcgtgaactacggccactactcggtggcgcagttcatcactggaggtgtgatcatcttcgttagcacgaatgtgctggagggcgttaatatggcgttgctgtcgaagacgatccccaagtccttcgcgaagggcaccttcaactccggcctgttggccacggaagccggcacattaggtcgagccattggtgacgttgcgatcacggtcgtcggtctgccgggcattcagtatgtgctgaactggacgttcgccccgttgatcggcatctcacttcttacaattctctacacgggccgcgtgtaccacaagcttgccaccgatgactaagactgcagttagatcgggcaaaggttagcacgcgcaccactgtcagatgcattcgacaacacgctgtgctgtcgttagccttgagctcattctgtattcgtgaataaaggacagaacaataactagccgcaattttgaagtactcgctcacgccttctcgatgacaatcgccgaggcacctcttccaccgttgcacacagcggcgcaccaatgcggcccccttcttgatgtaacacggagcacagcgtgacgacgatccgcgccccggagcaaccaagcgggtgtccaatggccacagcaccgccgtagacattcaccttggctgcatccagacccagtagcttcgtgttcgcgcaggcgactaccgaaaacgcctcgttgatctcgaagtagtcgacagcgtcttgagtgggccctgcgttcgccagcgccttgggaatggccagagctggcgacgtcgtaaacaaccgcggcttctgctcagcgtccgcaaagctgcgcacgaccgcttggaccttgcatcggtggcaagcttgtggtacacgcggcccgtgtcaccgagtcccaacgcctcgaccttgtcgcgactcatgagtaccagcgcggcagctccatcactaatgggcgacgcgttgccagcagtcacagttgggccaaagtcctcgctcggcttgaaacagggtcgaagcttgcccagcgacgccacgttcacttccctcgctacagcttcttcgtcctccgtcaccgtctgcggctctgcaccacgcttggccggaggaacctgcaccgcgaccacctcgcgcttaaacttgccgttcttcgtggcctcgcgagctcaagggtagctctcagccgcatatgcgtcctgcgcctctcttgagatgtcgtgcttgcgagcgcactcctctgcgatgtcccccatcggaatgttctcaaaggcattgaacagtccgtcctgttaccgaagcgaagcagctcatcagtacacgaaaactatttgacaatcagacccagacccacacactaccgcacatacagtctgcagtgcgtccgagaagaccaagtccccgtatctcgtcccaccgcgagctttctttccatgccgcccaccacgaccacatccctctgtcccagcataatggactgggcccccagcatcaccgctgcaatagaaagcacagtcagtactcttctgcattaatactctaaggataacctactgcgagccacctttcatgcctgaggcgcagactttgttgacggaggagcagacgacggactgcgggaggcccgcgctcactgccgcctgcttggtaggggcctggcccgctccggcggagatgacgtggcccagaatgagctcctccacgtcggtgggctgcactccgacgcggctcagcgcctctgcgtagaataatttagttagtgtactttagtgatgatacagatgatacaagtgtattcgttgctgcacctttgatggcgacgccggccaggtcggaggccttgagagccgagcgtttgccctgcaaggacccgcacggcctgcgcgcgacgccgacgatgcagacgtcgcggctggggctcgagacgcgcggcttcttggcaggcggcgggcactgctgctgctgtagtgattgctgcaaagcacaaggattttgttaagtagtggtatgaagtaggaatgaggcaacttcaacttgactgtccaaatcatgattttcttttctggtaaggtgaaaattccaatacgaattccaaagtcaccacccgccctggatcgtagccagccaagaaaaccatctacacgagtcatttgacaaacagggtatggtcgcttcgtgtcggtttaggatgacactaaagatgtggaggtggtcggacgagagacttggagattcccatcaacatatctacctggattgatcggtggatgtcttcctacccccgaccaccaccattttccagaactcactttccaatttcgacttccagcgccaagcgcccaccattcgcggcgaccaccctcacaattaaccgaaaactcttcctctcattcgtcatgtcgacccgacttacactcgcagttgccgtggtcgccttgctcaacagcggtgctctcgcgcaaagtccgcgtggaccgatgcgcgtgggccctctgactcgtgatcgcgagcagtttggtgcaggcaactcgctcggcggtgcaatgggcggccttggtggcggcaacggattcggaggtgctggtggctttggacaaccgggcggtggaatcggaggtggcaatccgcttggccttggagttggaggcggcgctgctgggcgtggccaagtaagcgctgctacaaatggattgatgaacggtgctggggcgagaagcgtcacggggacaggtctgggcaacggcggtcctgtgactcctgctccaacgacgccgagcggcactggaccggcatcccgcaacggaggaagtgctgctcttgccggagctggtgcgggtgcagctggtgctggcggttttggaggagctggggcgcttggaggggctggagcactcggcgctggtggattcggcggagctggcgcgcttcccggtgctggtgcttttggagcaggtggccagctcggtggtctcggtggtctcggtggtcaaatgggaggaggcatgggcggattcggtgggcgctttggcgcaggtgcaggcgggtttggtggtcttggaggcatgaatggcggtggattcggaactgggggccctgctttcggcgcccaaggccgcttcggagctgctgggcagtttggcggcgcggcggacggtaatggtatgtagatgcacggctgaaagtgtgcaagtcgcgcaccagttgtatttgatgaagtaaataccacgtttgattttctgttttcttttagccacgggcagagcttaggacggacgcctgagtctaatgagaatgaattagattgtggtgaaaggaagggggcactgctcgagttctcaattttcaactttgagctccggtgttgcgatcttctgaagtaagcagttgaagtggcggtaataccgccgtgtgattggctgcgaagcgttcgaaaaagatccgctgccgaaacgaaacgacgcagagcagagcgcatcgcatgtcaacgggcagagcgagaacgggatcatgcggcagggggctttggctcagttcccaagaagataaagctgggtgaagtgaagtcgacaaccgatccaatatggttcatggcggcgcgtggaggaagacggcgcttgtggcgctgtgccaactgtttatgacgctctcagacgcctccgtctccatcgtcgagcgggatgtcgagcccatcctgttcgagacttctgctgctacgtcagactcgactcccgtttgggtggtgctgtctatgctgctggacgtgcagccggtgctgatgaagctggacgtgacgcgccacgtgccggcgcaggtccagagcttctgtcgcgagcataacgtggatgtcacgaggtgcactggggccattcgagaggcgctggatgaagttgtggacttccagcggttctgcaagaaaccgaatgctgacagtgcgctgccggggtttgtggtggccaagcacgtacttcgtcacgatggcgagtccacttcggcgtcttggctgcagaacgacccggaggatgtggcgatggacttctgcgactttgctcacagtggagttgatgaaaagagtgcagacaagtgcgcggagaagcttggcgcagcgttgaggttggcatttgattggatgctcgcgctgacgccttgcgatcaggagagtgcaagcagcagtgaagtccacttacaagactcggagtcgctgaaccttgttgaacgccttgctacggttgaacagatgatcgctgagcttcacaatcccttggtggatgagagtgaagcaccgacggctcatgaggctgaagcagcggggcacccttccgacgaagacgttgattcggtcgagggggtcagcgaagtcgaagaacctgcggtccccgtggcagacaccaatggagacgctaacgcagtggtgacctcgacgccaataattgcagaagttgtcaaggacggtgaagctgttgatgaactttacgaagtagtcgaagccacccaagataaccaggacgaactaatcgagttgagccaagccaccgcgtctgacaccagtcccatcaaggattcaggctcagactcacaagaaaaggttttcgagtccgagcatgacgcccaactccaagccattgatctggacactatggagagtgcgttgccagcaggtaacggatcgtgcgacgctgcatttgatgcattgccggatgaagctactgacgaagctctggagccgcaaaagtcttggaaagttggggctgctcttgtgctggctctgtcgatcatgtacttggtgatcgatctgatgcttcaatgggcgcactacgtggcggattatctcggggctcagaagcaactgatcactgtgcttctgcgtgatattctactgctggtcggtgggggccctcgtagcacgctcacagattcgtactcaaatacagaggatgacgacctgaagaaacccgtgaaggaggagcccacagtttcaccacaggcagcggaatgctgcgaggtgacgaaagtccagcagctaagcaaggaacccaacgcaggcaagagcccggcgagccgagtagctgaggacgacgcaccgaagaaaaactcctcaccgataccaagtttcacttgcgtcgcgatgatgctgatggctggacgccaagctccaatctcccacgaccagttctcaatgtctctacgggcctcaaccttcgtgcagtcccacaatgaggagacgtctgcccgtgaagaagccgctggacaccgtatccagaaagtgtggcgcgctttccagcgcaagagcttgcccaaacaaggatgtggcagcacgttgagcgccttggttattccacacaaaactgacctcggaaagtcgcaccccagcactccgctcttccaactactgcggcttaaaggcaagaaggcagcacaaacccctcggggcgacaaagtgtccgcaggtttccaccgattggtaccgagcaccctgccaccgctttgaagtcgtcaacaattcatatattgagtaagtttgagaagctgtttcaccgcagtgagtttcatccgtcaaaatgagattgtgcacgaaccgttgccttccgttctgcattgagtccacgccattctacaatttgcctcgaatcgcatgagtcacgcgctgagctccgaagaactcgccgagttccgcgagatcttcaacctggtggatcgggtgcgagcacttgtatctctctacccaaacattcacaataattgaagacttacccacgctattgattgccttaggaccgcggtggatccatcacgaaagtggagctgggcgagttgatggacacgctcggcatcgatacgtcccccgaagagatcgacctcatgatcaacgaaatcgaccaggacagcaacggcgagatcgacttcgatgagttcgtggcggtcatgtcgaggaaagtgaacgccacgtacacggcagagcaagtcaaaagcgcgttcaaagcgttcgaaggcaactcctccgctccaggcttcatcatggccgacaagctgctcatagcgctgacgacctacggcgcagatcggatctccccagaccaagcccaggagctcatcagccaggtacgcaaccacaacactaacaacgctttctgttgctttcattctcaccattcatttacctgatctatgcgcagctcgagcctgatcaacacggcaacatcaactacattgaatatgtgaacatgatgatgtcggaatagagcttgagctgcctttctagccttgaactcacgcctcaggtgtgctctcagtcttactgtcactcgccacagcgggctgagatccgttctgatggttgatgtacaccaccgtgcaggtaatgtcgtcgtggaaacgtctccgcaccggaccttgtggcatagccatcagctcgtgcatcatgagcccgtctcgatgcgcgatcttctctaaggcggcgtggatgagagctgcgctcgctgttgaaaagaacagcgcctgatcggaatctacgcatgatcgatcaccaaatacggtgagtcttggtaaagttgtagcgtcatcggatctggcgtgaacgtaccgaacttgtcgacgatatgcacagcttcttgtggggtcatgacgtcccacaatccgtcgctcgctaagatgacgtatttctcgctgccatccatgtacacagtcgtgatactgggttctgaggtgatgtaaggcactttgctctgtgttgacaaaccaaatatcagtgtgagcaaatgaacggcatgctagcacatgaggagactgaccttgaaaggagctgagctgagctcaggacacttgaggtagaagtctccaaacgcgcgggtcatcgccaagctaccagcaacgcgcttaacgcccacgatgccagccccagtggcttgatcgtctttgctcattctgatggcgttccgatcgtgagaacgctcgacgacgagcttggcttcgtgcgggttgttgcaggagtggtcaactgagacttcaacagcctgaagtccttgagtctccttgctgattttgcccagaacagcagcgcagtcccccacattcgcgatgtagagaaccgagttgatgaacagtgcaataaccgcgcacgagccggcgttgcaatagcccttcgacatgcgaacatttgggggaagagccatgagcgactgcttcagctcgtcatcgcagcgagaaaaggcgctcttcacaattgcagaaacctcatcactggagttctttgaggtcacttcagctagtatactttgacacagggatgtgcggaggtgcctgcatccggtaaacagtcatggttagtgctgtagcccactcgcagtaaaacacagcaaaggtgcacgcttactcaactgccctagcgccgccgtggccgtcaaacaccgcgttaatctgaacaccttcatctgtcgacttcaccatgttaagacttcgatcttcgctcgggtcgttagcctgacaagacgataaactcaaaggttaatttcacagtcatagcaaacataatatttggaccccacacgagcatgccttacctggtactcggcggttcggtgagtcagcacaacttgcacagacggatccgagtcgatatcagtgcgctgccgcttcctcgaagcctgtccactgttcgcctgagtctgatgacaggtgcagctggcggatccgttactgggatcgcctccaggcagcgacgtgttgagcttcgccccatgagacgggttccacgagcagctaaacgccacttgggcggctttcagactcttcagcacgctcgcattcgtggccacgacgaagctcgcgcccaccacgtcgcattcgagtcttgtcagcgcatctcgtgcagcaaagatgctgtccgcctcgctgacccagtccgcaactgtagaatatagtccaaccacagcaactgccacgtcagaaccacgtttcaacttgcacatcctcgtcatctcctctcacctagcagcacgcgcgccgcatttccaatggccttgcgctttagctcgacagtgaactccccttctttgcagtcaatggtcactacacgcttgcatttggacttgcggatcgtggccttgccgggggccgtggcatcgcgtccgcgcttcttctggacctttgccgtcttcttcctcagcaccgagagctctccatacgctgcaacaaaagcacacacaaccgatcagatatctctaaataaccccacactattataacagccctgcgtaccgagctgtttggcgcctgcaatggcccccgcaatgccagtcgagaagtggtgcatccccggctcagagtccgccaccgtcttcgtcttctctgctccgctctgcgtcttcttggtcggtttgtctgcgttgccattcactgcaggagtgatggtcgttccctccacgtgcagcgccacgacctggtccacgtgcagcgcctcgaagggccggtagaggtccgtcacgagttgcagcagcgccgtcttgtcgcccagcacgcccgccaggtccaaggcgctctgcgacgcgcggctctcgcccgagcagaagcctgagagctccagcagatgcacgtacggcgccgccttgggctgcggcgggtggcgcggcggcagccccggcacggtcatggcttcggcactattgctctgctgctgcgtctctctttcgccactggataaaattggcgctcatcggcgcgtcgggattggtggaaatagatcatggtgtggtgcacaccatctcgtactttgcagggagctgaagctcttcgtggcattgcagggctgttggaaccgttggggctacatgcggcgcgggagctgtcgacgtcatggctgcgcgtacgtgggcaatgcttggatagtgttgatatgctccaccgatagcggcgtgtctgctgtatctgcagctgacgttgcagctgctgactctgcctagcagcgtcgcaatcgcttcgaacttgaagctaacgtccgtctgattccgacccgtgtgcaggtagttggcagtcttctcactgcaaacggacgcgcgtgctgcggcatctgtacttcaccagcggccgccactactgggaggtgctggtggagcgcatggcggaccctcggggcgtcgttgtgggcgtagcgccgtccgacgcgttggagactgggacccaagaggaggcggtggggtacgctgcgaccggtgtgatcttccacagcggcgaggaagtctgcagagcgcaggccttcgctgtgggagacacggtcggagtgtacctggacatgaacacacggcaggtggcgttcttcctgaacgacgaggcgcagctggaccctagacaagaggcagagcaggagacgaccgcaggtggacgtgatgccggcgatgacgcgctcagtcgtgttggcaatggggtggctggtgcagctgatccggacctggagatgaagactcctacgtactcagtggatgcaaggaggatatcgtggtactccttcagagctcgctccatgtttgcagctcttggcgtctcctctggcgcggacagtctcgttgtggtggggtcagaggtgcccgatggctatcgatagggattttgggcgggtgtttgagctgttagagcgagcaccgacagttggtaggtaggtagtttagttacttcacagtatttaatcgcgggttacgtttttgttgttcggggcatgcaagactaacaacgccagcccgcgtgacggacgagcggatcactggagcaaaaccttctcgatcacagcttcgcgcacaggcagcaggtgctggaacgtgtcgatgttggtgtagttggccatgttcttcgggtggcccttggcgaacagcacgtcgaactgctcctccttgcgcgtgtactcacggatgaagtggtcgttgccgaagaggtggtggatgcgcgtctcatgcagacgaacgacgacgtggtccagacgcatccagtagcgtgacaacacgtagaaccccgacggcatcacgcgctgcaataagacaatcacgacgagttagcgtaatgacaccaggcacggacaggagttcgaggttcaggcaacgcttaccactttcacggacatggcggaggttccgtggtcgtgcagttcatcctcgtacagcccgacgtcctcgaaccaaagaatcggctcgcgctccttgagcttctcaaagttgatgcgctcgcgcgtggcctccaccttcgcctcctcatcactctttgtaaaagtcgcaggcgaggcttcagtcttcgtgagacgctgcagcgaccccttgtagtccgtcgagtacgtccagtcgtacgtgatgtcgagctccttcacgtcctccctattaaacggagcaaacaaacagacactatcaataccgaaacactgcacctcatcccctcctatgagctccacgtacttgttggtgttgtgcttggcgatggagaccttgagctgctggttggcgacgatgtcttgcgcctggtcactggccggcggcgggaagtgcgcgcccttgagcgcctccaccgccaggaagttgtagcacacgccagacggctcgtggaacagcagcagctggttcttgccgaagaccatctcgggcggcgtcaacttggccgcctcgccgattctgcaatgcaggacaagatggttacatttgtgcgtcagaactctcccaattgcacttaatatggctaccaacttactcgtccactgtgtcgatgggcgtgatgtgggtcttgttggagccgatgacccagccgtgcagacggatgcccttgtgctccacagggtccgcctgcgcctcgatgttgttctcccggcgcgagtcgcccaggtacacgggcttggtgggcgcggcgctgtcctccgcggtcttatacagctcctgcagcagctccggagcgccgttctccagcgtgtagaaccctgtggacgccatgacacttcctcgctacgatacgatggctcgtgttgttgatcgttgtcaaacagaaatggcatttatgtatcggaacacaatgcgaaatcagatggctacatgtattatatacatgaaatggctacattgacactaggaccgacacaggcagtggaagtgcagcatgagcagcggtgtcgtggccgtcacgtccgggtagaactgcttgagaaccgccaacacctcgtcagtcgagttgaagccggatttgcgcagcgtggcgtcgtcaatggcgttgagctcgtgcgtttcgacttgatcgatcctcaggtacgcgaactgcggtcttgatgaagagccatcggtacttgaagtcgtcgcagcgacgacggagtgcgggaaaatgccccctaaatccgagttccgatcgcccatgatgtccgatagcagtcgcattgtgatgattttcgtgccgcgaagaattccgtcgacgaggtttgcaccgaagtccagccgcgggaatgaccgacttttgagcagcgcagcgttatcaacgcttagcggcgtcgaaccagacgaggtgagtaccgcgtgaaacacatggagatcccgcataaagtgagggttgatctcaatccatgggcggatgatcctagagagcagcgagcgcaatacattagcttacatgcatactgcttcggcctaaagtcttcgatgatagttcgcacctgatccggtcaacagcgtcttgcacggttaaaagcttcggctcggtagcaagcatccatgcgactactacagatgcggaacgtgatctaccggcaatactaaacaacaaaaagcacatgatcgtttagcgacgtacttcagtaaaccggaatgcagccgccagctcatcatttgacgtaccaatgcaccaacacgtgctctgccttctcactgttgtcgttcaacaccaagtattcaagcacactcaatgtaatctcttgtacgcccattgcagcatttgacccacttacacgagcttccctagcgcggcaagtatctcgggcagtctgcgcagcaagtctccgtcctccgagtcctcaatctcgaagctcctcctggcaatctgcatctgtgcgtactgctcgcccacggagctcgagtgcgtcgacacagccgcgtcctcctcccccttgccgagcaacgcaagcgccgcaccgatgcgctgtcgcttcagcgctgcgatgttcctggccgcgtcgatggagccgaggaagagccttcctgtgatgtgcatgggctcgtcgtccgtcatctcctcgatctccacctcctcatactcctcttcatacccctcctctccgtcctgtaggccgcgcgctgcctcctctccagaggcgtaggcctcgtaccagtctcggtccgccgccgccatggcaagtcgcctccccgaaatggctacacctggtgtacctccacaccaactaaaatcggcaggtcagcggtcttggctctatctcgggaaagcgacggccgtcatcgctaacgtgcgactagagctgccctcgttcggtgcgccttctctcgctgtgcacgcgtcgacgcgctctcctgtcagcagggctcgactctagagacgctgctgcatacgacgccgtgtctctgagcccgcgaggacgcccagaggccccgcaatcgcagacacagacgcagccatgagccagcccgcggagaacggcggccagacggcggaggaggccgagatggagcggctctttggccacatggagacgctgcgcgtgtccgaggcggcgcgcgcggccgccaacgtctcggaggacgaggaggaagaagaggaggaggaggaggactcgagcgctctggaggacgacgacgacgatgacgacgacgacgaggacaacgacgtggagggcagcgacgaggaagaagaggagacgagctggatcgcgtggttctgctcgctgcgcgagaactcgttcctgtgcgaggtggacgaggactacatcgaggacgacttcaacctcactgggctcagcagcatcgtgccgtactacgactacgcgctcgacatcatcctggacatcgagacgcccaacgacagcaacctcacgcagacccagcaggagatgatcgagtccgcggccgagatgctctacgggctcatccacgcgcgctacatcctgaccaccaagggcatggccgccatgttagaaaagtaccagaacgtcgacttcggccgctgtcatcgcgtctactgccagggccagcccgtgctgcccgtgggccagtcggacgtgccgcggcacacgaccgtcaacgtcttctgccccaagtgccgcgacattttcttccccaagtcgcagcgcgcaggccgtacgtctgcctgccatatctttctggtgctggttgagaggtgaaggctgactggttgctgctgttgttattgtgttgctgctgacagagattgacggcgcgtacttcggcgcgacgttcccgcatgtgttccttatgacgcattcccatcttgtggtgccgccaccgacgcagacgtacgtgccgcgcgtgttcggctacaagatccacagctcgagcgagtactacactggcaagaagaagggttcgtccggccgcgagcgggaaaagtaccggaaagtcatgactttgattgaccgcttgaagggtcgaccaaacgacgaacaggctaggtgaacgatctcccacgtgagcagaggcctctcccccgcaccgaggtgtgggaagcaaaggaggatggatacaaggggcggggagggaggaagggagggatgatcttttgcttttttgcgcctggaggactcgcgaggaccggcgacaagcgctgcatatgactttgcgaaggctctccggtggctatgaggcgacacaacgcgagcggatattcgcttactatttgactagcggtggaagctgatcgacggcgtaatgtacatgtgcaccgttcattgcaccggttttcgtctgtcgcctatgtagcttcataggattctctcacgtagaaacttgttgtgtattgtgttcttaccaaaacgtcgtacgcagttccacttagcatcacgggacctcgagaatcgcgtcgacctcccaggtcacgtggccaactccgtcgcgatagagctgcagggagaagaagaagtcgcgcttcgactcaaccaggtactcttggatgaatgccagcgacagctccggactccgcgctggtccagcagcttccagcattccgtcgacaaccgtggcgggaagtaggcgaaccaaagggagtgcctcgggtggcgtggctgtcttgacgcttccgttgacgactggcctctggtacagcggattgatactcaccgccacagtcagaatttcaatggtgtcgccgttggggtcgaagagctccagcaacactgatggtccgtcttttgtccgcttgtcttcgttgctgatagcccgcacttggccgacgaagccaacgtgcagttgctcagaggcccccatacgtacccccagcagcttcaagtccctgaacgaacaaccaacacccagtcattaaacgggtcaccagcactactgcacaaaccaggcaagtcacctacctgaacgaacacactttcaggttgaacgcttccttgaactcttcaacatccgatggcaggcaattccgaggccgatattttttctcaatgtgcgcagtcagcttgctctctccaaactctttgcgcgagtctagaacagcgttcttcttgatgctattcgcgaagtagacgttcaggctgcactcttcgatggagtggaacggccgcacagcttcgttcatgcgaagaacagagaacacgctcgtcgtcgcatactggatccgcttctccgccgtaccagcccccggtagcatgacccattgaagcttggtgatcatcaaggtgttgccagcctcaagggatcggaacaccgcgggctgggagcactcagtgagcttgagaacgagctcgtgcgacgagctgctatcaatcatcttcacccaccgatactcggtaacttcaggcgagtcctcctcgcccagtctccgctttcgcccgcgacaaattctcccgacattcgacagcaccccgacgaagtcgaagtacatgatgtcaaggtcgttgatcgccttttgcccccaatagagagtgttcaatgtgttcacgaagctgcattcgagccaggatgggcgcgggaggtggggcttccacgagcctggctgagcaatgtcctcgctgacctctagcagctgcggggccacctttgtcaactgcaggagcgcccagtacttttctgtcatccgcaatagcaaacaaaacaagggggtgagtacgtgagtgtcgccgcgctttcaaacgatggagcatacgcactcggtacatggagggcactaccaaaggagtcgtgctcatagtacaacaaggggctgctggtcatagtgtactgaagatcgtgcgggtggacagttgaatagcctcggaactggatgaggtccccttcgcgcaacgacagatagtacttggcgcacatggagccgaagaacgcgacttcaaacacgccagtagcatcgactacaaacccacaagaagtgaggttagagacgcaagcagttgcaagtaaaaatctgacgttacttaccaacgaccgcgttgaatgcgaaggggaacggattcgcaacgtcgggatcccccatgttcatcaccttggattttactcggatagctccaatcatgggaggaagtgctttacgagtagcccccggctcgctgttcttcttaatctgatcaagaacctccaggatggtatggatcttcttgcattcgggcgtgaacagatccgagcaatactccgggttgatgttccacgccaccacagagctgggtccagtctcctgcccatcgttagacccatccgagccttcagggccgccataccgtctagcccaatcgctctccagttcgtcaagcggcgagtcttcgtccgggactccacccgtgaagctgcacgcccaatcgagcgtgtagtggtccgaccgcagcggcaagtagtacgcgcgctcccccgccaacggcagcagctccacttctcgcggatgctgagtcgacagaaactgaagctcgtcgtcattgctgcgagcgccgtagcgccgcgcaagcaccttgtcgggcagcactccgtccttattggacgacgtgacttggacttcctggagcacgaccacgcgctgcttctgcttgtcgtcctctgggtcctcaccgaagacctgaaacttcttgacctgcagcaatcacaatggcatcataatggttaggagacgtcaattgaccagcctcaatgtagagcgctcacgctgacgaagctgtgcgctgcgagctcccgcgtccagacgagctggttgagcttgggatcgagcaccgccttcatcttgtggcggccgtcgctcagcagcacgtcgaacacgtcgcgcgctccctcgaactgctgcccgagtcggtccttgagcgccgggtccgccaggtctgttgatggtaggtaacaagcagccaagtggtggaaagtgtcagcaacctgtagcatcgatagggtattgaacttgttacaggtcgacgaccacgccacgtacagcgatagacgccgagaacttgcacccgcaccgtggccccatcggcgctgtcctgccagagttggcgcaggccatgggtcgtcagcagcgacgaggacgccgccgtcgtcaccggcgtccttccgcccatacctgcgttgttttgaaatatgctcttgtttgcttctgtatagttccaaataagagcacatttcaatatacatgtattatgtatacttgcaatagtggcatctaagttcgcgaacttaatgataccacgttttgaatttgccgcccactcttcaaacacagttgtattatatcaacagcgatgaccattgaagccgcggcctccacctctgccggctctgtagctccgcgccgcgtggtcttctcaggcgcggaagtgatcgagtacgacgcggatcaggcgcccgtggtcaagctgtgcggcgctgcgggtgcaccggacggcggcgccctggccctcgaatgccaggcacgaggcctcgtcgactcaaccgccgccaacatcgatcacaatgacgcagcgcatacgctgacgctccagtacgtagaggaactgcagagcttcctgcgccaacgcggctttgagccaatgagcgacgacctgcgcgagctgcagacgcagcgccgcgtcgtggagctgctgctgctgtgggcgtccggtgctgaccccgacgctctccaggtagagcaggtagaacaggtagaacaggtagaacaggacaaggagaaccagagcagcctcaaggcgctggacgtgctggacccggcgacgctgcggcgcgcgcagctggccaagaagcagctcgagggcctcgtggacgacggctacgcgttcggacgccgcttcatgtcggtggtcgcgtacgtggagacgctcgagagccacgagctgctgattgcggccaaggagcacggactggagccgcccaagctggacgacaagcagggagcagctgtcaaggcgctggacagggagctgctcggactctacggcacggcggaggggcggccgctgaggtcgctgacgctccggcagctggtgacggaggcggaggctcgggggttcatggggcctggaggagaaaaggccagagatgccaagggcaagaagagcaaacgcgcgtgggtggatctgctgcggcccgtcatggtgacggaggtgagggcggccaagatccgcgagcaggaggaggagctgctgaggcagaagctcgtggcggagctggagcgcaagaagcagagggagcagcaccagcgcgtggtacaaatcattgaaaccgtgatgaagcagagtgtcggtgctgactgtgcggagccggaggacgatgacggtctcgaagacaaccagggcaccaccagcaagcagtcgaagcagtcgcccgacgaagctcgaaagtacctgaaggctctagccaagagtgtttgcatacctagcgaggcgcaggaggatgttgttatgagggaatgaatcaagggtgcactgcatacttcacttcgcttggcttggagtctgaagtccatgggcagagcgtgacgcggggtgtggagacctcgccacttgaaacgaacgcgcgggaaatctcgactattttagctgcgccaggaatattctcctctcctgaacaaagtttggtcaaagcgagttgcaaggctggtatatgtgggctatctaaagcccatgcgtcgacagccaacaacagagacggacgactcagcaccggagcgtgtggcgctgttttcgtcgtctcgcaggctctcgggtgcattgacgcggtgtttgtgaaagaagactcgacttgggccatcccgaccccgattccagagccgcccgccccacacatgacaacgtcgagggggcccttagccaagatgtcgtcattgcaccgtcgccagtccgcgctgaatctgcctacgagcgatgacgggtccagtaccagtcctccatcagagatccagccagctctgtcgctcacagacgttcaagataatgaaaatacctcgcaaggggagccctcgcccacatctcggagtttccgcgacaaacccagcaaaacgtcggggctttcaagtcgcagcagcggcagacaattcccattagaaacaaacccggaactctacgactcgcaatcaagcgcgacggaactcggtcaacaagcgtccgatactcagcgcagtcgacggggatctcgctccagacacctgcggacactttcgagagattttgtactaccttcgatgccttcttcatccgtccgacacgaaaacctgaccagtctcaaggaccagttcctcaaaatcaaggagcggttctccccgtccgtcctaccgctgtcgaacacttctaccgccacagtgacgccgtcgtgcttggtttctgaggtcacaacagtaaataacagcgcgttgaccacctcgtcgtccgatcaagccactaccacccaggtattatcatccatacaagccccgccagaccatcagaccgaaggcagctgggaactaccgcaggctcgagtagagcgctggtatcgggaggacgacttcttcaaggcctgcatcacttgctggacgatggaggctggggctgccattgtctccaaggtggcgcgagtggtctccgagtgggctttggacacctccagtaccagtagccagaccccaccgtctaccagctcgaatgccattaacccggacgtgtcactgcaatggatcgggcgacagctttgggccgtcaccgtttcactgccgctcacgcgctcgggagagcttcacgcggagcatattacgctggcgcatcgtatcaaccaagctgtagctgagatctccaagcaaacgagctccccgttcattggattgccgactgcggagactccagcggctggcgttgccaatgaggagagcagtgatccgcagcctccgctctcccctattcaacttacgaggagtgacgacgacgacctgagccaggagaagctccagttgagtcccttcagcacgctggtggcggaggatatcgaggttctgcggctatcacaagctcaaatggccgacaagaagagagaagacggagatagagctgaatctcgtgcggatggagagcggcaaagagaggaggcggagatgtcggccgatcgcggccaaaacgacgaagaggaggaagaagacagcagcgagcaagtctccgcactcccgttgtcgtggtccatgctctcgttatcgtcgcagccctcgggatcgtcagagcatgcgtcgttgcagggggaattatctatcaccgacgacgacagtataacggatccagtggcccacctggctccagagaagatgggctggctcaagaagaagaaacgcaagcaacacggcctcggcagcgcctggcagccgcgctacttcgagctcaaaggcaaccggctgtactatttcgctagtgaagccgacggtcttccgcgtggtgctgtactgctggaccatgcactcgttcaacgcggtcgtggtgaccacgccatggccttcagtatctcgagtgcgagctcacaccggcgactgcaagtcctcaagttctcagccagactcacgcaccaagtcttcccgtacgtggtatggctgagctatactgcatagcgtcacctaactctgcgcttgtcttgttgttgtaggcggaaatcaattgagctgcgggttgttgaggagacggaggctgctgtgtgtgcgtgggtagcagcactcaaccgcgcctccttctactgcaaactagcatcagccacagccggctcttcatcgacgctaccagctcactcctcgtcgtcgtttggacccttctcgaccccccacaagaagcggaaaacgccgttctatcgctttcggtcccctacagcaaccaaggcggcactcgcgtcttcagcgctgtcactatcagctgagaaggagcggcaggacgtggaagacgccgacacggaagagctgcggaccaccaccgcgcgctggacggcatcgtaccagcaactggggagtgtgcagtacttacgcgagaccgatccgctgctgtgggagatccacccgccagagcagattgcgatccgcaagaaggcggcacgcgcgcggacacgcggagactacctggccatcttctcgcggcatgcggagaccttcgctcagatctttttgcctagaccgcagccgatctccctcgagcaaacgctgcgtgacattctacccgagttattcctcatcaatgacacattatacggtggaggcgagcagcagcaacagcaacaagcagcggagcaaaacgccggtgattcttcgactcaaccgcaacagaaccgcggtcttgaacacatctttgaggtgctcgatgcccacatccagcgcttcgcggctgcccccgaggagcgcgtgcgcgctgtgagcgccttgttgcaggcgtgcgcacgaacgatcagcggcggcgactcgtacttcgtggtgcatcgattactgggcaacccgaacctgatcatccgaccggctgaggcgcgaggacggcccattgagatcgacgtgtcgcccgagcgtccgagccgcttcctgatcactgtgtttagcgccttctcgttccatttgctggacgacgtggagcgcttcggcgactcgaacgacgcgagcggcggtgggatgacgcccgccccgctgctgcgagttcggacgcggcatattcaggagtttgacttcgccagcggaacgtccacgcgctggctgcgtatcgatgtggaaggccgcaaggaagacggcagtcctgggcatggcggtggaggtggaggcagcactctcggacgttggggcagtcggcggcagtcgcacgaaggtgctgccgaatcgcgtatcggagcgttgttggatgcgctgtcatgatgcagagcttgtgttagctctcaatagaccgccgcagcgtggaagggttcatagtacggcctcaacgctcgcccaaatgtccgatctcgagaatagcgtccattgcacgaagcgatgacgctcggcaccccagccagaccaagacgccgctttcacctcgccaactgctgccttggctcaagaagtaataaggctgataagcccgcgaagaatgtaataagcgtacgcctgactacgtagtgctgcctacgcactcttacagtcaaagtggtcggtcaaacacattagacaagtaagtatggacaaaactcctcctttgaccggacgtatagtttgttttttgccatctatgtgtgaccactactcctctcgttttctcgagacgtcttcatttgatcaaaccaaagcaggagttctgactgaaccatctctgagcatgaagtgtctgtagctcctgggaatcgaagtcgagcctgcacgcagacgcgctcggcgaattcctcaatttcctcttcgaccggaagatagaccatctttaaaccagcacgagttggagtggagaccgtagcttcgacctccagctttcccgtttcctcctgtaaattccgagaagaaagctcaactcttaatgactcccgcgagaacggcagtggccctttcgacggcgcaccaatgtcgttcctcatccagacgttccactgaaatccgtggcaaaagcgcctcccagacaacacattatcgtgaatcacgcgaatagctgacaccgtcaagtcgctcaaagctacgagatcatctgtgcatggcccccagttcaaatggtccagcccagtcaagtgcttcggatgaacctgcagcgacagcatccacagagcagtcgatatgtcgtccatcccgcctaaatcgcgcaggcgatggcgattcttggacacaaagcgcacacaatccatcgacaggaagaagttggctcctagagcgaatggcggcagttcacgcatcggatactgctcgtaagggaggtagtggcgcggggcaggattcctgttcggcgggattttggcgatactttgtagagcgcgcacgtgaccaacgtagaagcgacgaagcggacccaagcgcttcagccacgcagcgatattatccagacggaagtacaagttgtcgtctgccaccatgatgtactgagagtccgggaatcgagtcgctgcaaagtggaaaaactccttcgttttatctgcaaggcggccgtacgcatcatcacaacccagctcatccgtcaataggtcgccgtaaacctgcttctccagctccacagactcccaaattccagagttgtaagaatctccgccagctcgcgacgcgtgcggtcgacatcccagaaaaaccaccttgactccttgaggtagaacggatttactcgcccatgtctctcggatcgcctgtcgaaaggggaaattagacacgaccgccgtcctcacgcctaccagaagcatcgggtcagatgctgccttatcccctggaccgtagctctggatcccgttgtctccgtcgtgcttccgcccactccacaagcgactgcagatatcctgctcgatgcctcttaccatctttctcaatctcctgggcaatgtgcgcgttgaactctgtgttattcacttgtgtgaacgtaacaggagacgattgaggatacgatcctcgatcctccagtttgaacgatcccgaacgcaccaagaaagctcgggcggtacaattgccgaggtgatgaaaccaaaatgtcgactggtcgatgggggagcagtggacaatctcctcgttgacctcgatgcagagactccctccttcgtacagagtttcaaagagctggttactactgccggggcgaaggtcgatcagtgtctagaacatgactggggacttctcgattgccctatcgggtggacgaacgatccggattgcggtcactgggtcctcgacgtcatcatcattggcttctagtgtccttgactcgggcggcagcggcccagcgaagcagcaaagcgcacaattcaaccagagcagaggaccagccaacttcattgttgcgatcttttgccgatcttttgatgtgcatcagaaacgttctattttttttgctttacgttggtcagaagcgctattatattttttattttatcggtcagcatgatttccttacaagattaattacgttgctcaatgcatgttaactccttaaggcgtagtgacagctctggtagttctgaattcgctcatagaatttctgaagctcaacacctagttgagtagcaatctcatcgcatgataactgctcaacagctccgggaaaactcaagcgagtctcggcacacattcgaagcgcatactctgagcaattgccttcctcgtgaaggtacggcactttaattccagcgtgggagggcgtagaaatcgttgtagtaattcgtagacagctcgtgttctcgacagtgaatccaaactgaagtgtcgaatccgtggcaaaagccgcgattcctcaacagattggcgtggatttcacgaatcgccagcgaagataaatctccaaataccagtagagtttcggtgcagggttctaggcgaagaaacccgagttgtgggaaatgttgagcgtgtgcctgggctgttagcatccagagcgcaattgtgatgtcgtccatgccgccaaggtcccggaggcgacggcggttcttggagataaacttcacgcaatccattgacaggaagaaatacgctccaatcgcgaatggaggcaactcaggcataggatactgcgtcctggataaagtatagcgaaaactggtttcccgcgtgggtacttccttggtagcatgttgtactgagagcacttggccgctgtagtatctcgtctgtggcccgaggcgtttgaagtgatccaccagcatatctgcgcggacgtaaacgtcatcgtcggcaatcatcacgtactgggcatgagcaaaccgcttggctgctacgtggtagaattccttcactttgtttgcgagatcgagatacgtatcgtcacaatcgagttcgtgtgttagcaagtcaccgtacatcagttgctccagcgcaatagcgtctcgtagacgtcgccgctcccagtcgttctcgtccgaattcaatcttgaaccttcatccacgcgagctataggccgacaccccagaaagacgacattgacaccatcaggtagtgcgtctttgctcgcccaagtctcgcgaatcgcctgccggagcgcgaagtttgtagcgattgcggtttttattccgatcagaagcaccagacactctgcactttggtcggcaaaatgaagtcctacctcattctgctcaagagccttcagtaggctttcatctcgctgtgattgctgcagtgtcgcccactcgaggagggacaagtcgtagccttcacgcagccgattccttctggcttgtgtgcgcatatccagatgatcagtgaactcggagccttccatcacagtaaatcctactgcaggggacagccagtatcgctgtccaacaggttcctcagcgctgctgacgtcgctcaaatacgcccgaactgaaaagctcccaagctgttgaatctgaatctgcgaccgcgtgcttctgatagcagagcagcccaaagtcgcgttgtccacctcgaagcacaaactcgtctcgccgtacagcacgttgaacagctgagctccgccttgtcggacgttgatcttggcaaataatttcaccggcggggtctcaactgaatcattgagaggatagagcatctccacggtcgtaacggggtcctccacgcagctctctacgcgatgcggagctggtgacagcccgggtcgaacccaatgcatgtaaccaggcccatgtcaagagaagccttcttgcagccatgcacatcaaatccgcgatctttcggtgtgcgacgccacttcatcaaagaagaccctcagccccccccccctccccctgacacggcaatgctcatttgtctgcagctccttgtgtttgttgccgcggtaggcattgtcgtccatgccgcgttgccccagggtccgccagagggggaggacccgattctcaagttcctcatcaaccatcctacgaacggctcggtggtggcgctgcctctgaaagtctcgtgccatatgagcgtcaaaagcatcgagtcgttctcggcgcactacgcggggatgctggcgtgcatcgagattcaagacgtggaaaccaagtgcaacccggtccttgattccgatatcgtgttcgacgagctcccgcaaggccaccacactgttcgagccttcattacagacgacatggaccatggcgcgcatcgccatttgacggaggccgcgacatttgccatcgtgagtactgacgaatttgacgaatacagtaaggaagtggtgcagcgaagacaagaggagctcgagttgcccagagactgggatatcctgacgtgggcgcagcagcaacaagatacaggggataaggccgataaggcctcgtcaagtggagaggctgacgacgtgcagcttgtaattggggtcaagactgccgttctgtcaaacttccctcgtcgccaggctattcgagaaacttgggggagacaagcgcctctgtccaaagtcaaggttttgtttcttggttgcaatcccaacatgcttggtatcgacgatgagagacatcgacagctcttcagagatgcggttgcgctagagaaggcagcatacggcgacttgctgacggaggagctggactgccaagacgcgtatgagctccttcccgacaaggtgacgaagttttaccactttgcagcgataaatttccctcaaacttcgtacgtgatgatcgcagatgatgatatttatctacgggtcgataaactggtgaagttgctcgacggattggatagcacgaagcgcgtatacttgggtcaggcgtggaattcggtattcagcagagcgtcgacccccgttcgagaggaatttcacaaaaactatctgccaatggagcaatatcccatgagtcagcttctgccgtacgcgtttggggcccaccacgtcatttcaatggattgtactcgctttatttcaaagaactattggcgactgcgaggaatgagcggactggacgacgtgagcgtggcgctgtggctcttgacgatgcaagttcgtttgaaacatacccagacgttcgcgcatctcacgactcaggcgtgcaaaaacaccttaatctcatttgccgagttgtcgccgctgggcattcgagcgattcacacaaaccttctccgtgggaatgagttttgcgacgacttcgatcgcacggcgtcgaacgaatataaggcgctctccccgctagaaattctggccacgcagggcttaacatcctctgcggccaattgagtagatagcagtgaaaattttgcaaactttacgtagattctgactgtcagagtgacgcaggtcagggctgtttaacccaacatttcaccgacggtgcaattcgactatccgctggaaatccacactcataatcctgagccaccagcgataagcttatcaacggtctacggggcgtttccatgtctctttgcagttccagtaggaccaaagcggacgcggtgttgaaaggcgtggcgcggattgagatattttagaacagtttgcttgtttgttttttcttttcagttgtggacaagatgaagaaggggaagaagaagaaaaacaacgtgagagtagctgtggactttaatatagtttctgtaccaaagtgctacacattggcttgtttgtgtggtagagtctctgaccctccacgaaaactgtgaagcttcgactcgaccattttgccgatctgtgtacaagcagtggcgttaaccgcgctggggaagcttaaacgagcctcagcgcatacccggcacgagtaggctgaaaacgtttcactggacggagagtacgacactttgatcccagcgtgggaaggcgttgaaatagtcgttgtgatctggagcaggtcaggattgtcagcgttcacaatgccaaactcaaactgtaggcgctctggataagtaggcaacacgcggagcaatccatcttccttcgcgtcgcccgatgctttgagccacaattttcggtcgaatccgtggcagaagcggcgttgctcttgcaagttgttgtgaacttctcgaagtgccagtggggacaagtccccaaatgccacaaagttatcgctgcatggttctgcgcgtaagtagcccagccacggcaagtgctggacgtgcacttggattaccagcatccagagcggtaccgtgatgtcgtcgattccgttaaggccgcggaggcgacgtcgattcttggagacaaacttcgcacagtccattgagaggaagaagtacgcgcccattgccatcggaggaagctctgagagcggatacagttccttgggcaaggaatagcgcaaactggtgtctctgttgggcctatcttttcgaacatgttgcaccgatggcacctgcccactgaagtatcgagtctgcgggccaatgcttttcagatactcgagcagtttgtccgctcgaatgtagacgtcatcgtcagcgagcatcacaaattgagcacgcgagaactgcgtcgctgcaacgtgtaagaactccttcaccttgtccgataattccaggtaagagtcgttgcagtcgagctcgtccgtaagcagatccccatacaccaacttctccagttcgacagcttctcggaggcgcctgcgttccggtgtctcgggaatagaagcatcggcgacaaacgatatcggacgacatcccacaaaaaacactttaaggccgcgatgcaaagcgtcctttctggcccaagtttctctaaccgcctgtcgaagtgcaaaattcgtgttcaccgctgtcttgactccaatcaaaagcaccaactcttcctcatcatccgtagctgctccagattgaagacccacacgatcttcctcgagtctttggagtatttcttgaggtcggcgtcgctgttgctcggaagcccactccgttaaagaaagatcaaatccagcccggtacttcccttgtcttgagcgcacatagtctgcagtgcgtgcgtcaaactgatcattgctgacaacagtaaacgtaatcggctgcgacgtccagtaccgctcgcctttgggctttccttcctcgtcgatgtgcgtgaagtaggcctgtatagtgtagttgccagacggccaatcttgcctcttgtcccaacgatcgcccaccgaggcgcaaataaacgtcacgcttctcgactcgaagcaaatgctcatgtcagcgtacagctcgctgtacaggtcagccccgccatcccggatattgaccaccgaggccagtcggaagggcgaagtctccgtagctccattgagggggtacatgatctctagagacctaaccggatcctctttaccccctcgttgcaatccactgagcgggtcgttgctacttacgcctctcatatccgacacccactgctccttgcctgacgagcagcagatgcaggccacaagagccacaacgaaggccgccacttcgcgcattgcgatcgtccgtcacgcgtgtcaaaagcgatctttcggtggtcgattgttatggctacattttacatggctacatccaaccttgcgttgctttttgctgcagtcagatggggtcataaatactagaacgtttttgctgatcaaagatccgcgaaaagatcttcttgtcgagccccagatgaagctgttcctcgcggttgttgctctcctcttgctccacattcgcgcggcatctcgtctcaccgatccgctggttggggacggaatccaagtgccactgaatgctgagccaaccttatcgacagccacagcgatcccgttcgaggaatcagtctcatttatccgactgacggagcgatcgagatgtcccctgtggtgtttcgagtgcaaatccacgtgcagcctggcggggaaaagcttttcagcgcccagtacgcgaacgccagtttctgcgttgaagtgaatgctgtcacgattttctgctccaaagtgggcgagcccggcctcgaataccactacgtcggcaagtgcacagcacgcgtgtacctcaaacgacctggaggtgacgagggcgaagtgaaaagtgtgtccgacccaatctccttcatgctggtcgacgaaacggaattgattgcgcgtgttagcagagaaatcgaccaggatcacaaaaagcatcgagcggggtatcggctgtcgcttgtggattgggcccattcccagcatagacgaccggaccgcgacattctacaaagaattgagcaggatcgccgtggaatgggagaccgcacaacaacggcgaatgagacggcagagctctttctggttgttggtgtaaaaacggcggttatttctcgcttcccgcttcgacaggctatccgagagacgtgggcgagccaatcttcgctgcctcagggagtgaaggtgattttcctgggctgtcggccgcatgctgtcgccagtccgtcgctggaagaagcgaaactatgtcggatctgggaatcaatcgagctcgagaagcaagtctacgctgatctgttaaccgacgagttggattgcgacgatgcgtacgtccgcttggcagacaaatcaaaagagtttcttcacctagtggcgacgcgatactcgaacgcgcagtacgccatggtggctgacgatgacatctaccttgaattgctgaaagaactgggccctcaagagcgattctatgcaggccgcgtccgcgagatcgaaaatgcccgcaaaactccaccaactcggaaccccgagtctcctcactacctcacgaaagcgcagtatccaatcagcaagttgcctccgttcgcgcttggagctaacttcttcttgtccatggacaacgtgcaatttgtgtcgaaaaatcgccgaagactgcgggatttgggaggaatggacgatatctccgttgccctctggatgctggcgagacaagtgcacccgatgcatctcactggtctccagcatctaaggtcagggccttgcaaggactttgagcgatttatcggcgtcggctatttgcttgatccacgcgaatgtagtagctccgcgtggcttctgtcatggctttgatcgatacgtctggatggggctgaatgatgacgaaccagcacgaggtattcttcgggcgctgccattttctggggaacatctgcaggtagagatatcactgattgagttggagcgaccgagtgaacttcatatcactaccacgatatcggcgtcaactcatgctggtatcaaggtacagtattttccgcgtcatgggcaattaaatgaatacttgcggaggctctgcgcccaaacgcgtctgaacttccaggttcggtccgttcatgtgccgagatcctggcaagaatatgctcaacgctaaatggtaacgttcaaggcgtgaatgaatcgcaaattactgagtggggacgacagctgcagtgcagtagtccgataactgagatcggagcaatcgcatactttgcattcacttcattcgtagcctgtcctcgatatgcaaacgtttgcacgacaactcgtatccatcgtctcgttcttagagtgtacgaattgctgatcacctcaagccatctttatcccacgtatgtgcgttgaacccgtggcagaagttgcgtcctgcctgcaagttgctgtgaataacgcgtattgcgaacggccccaagtccgcgtatgctagcaggtcgtccaagcacggagtctcgcggagattattgaataggtcgaggtgctgcgggtggacttggatcgcgagcagccagagtgctatggtcacatcgtcgagtggcccaagcccctgcagctcttcgcgattgtccgcgatgaactcgacaacgtccatcgacatgaggtaatgaggaccccacgcgaatggggggaactcgtccagagggtagacagactctggcaggtagtaccgacgctgcgggtctctctccgggacgaaagagttgccttgcttcacgtgaccagcatataaatcgtgtagaggacccaacgctgccagttgctctgccaagtctcgagcgcgcacatacacgtcgtcgtcggcgatcatcacgtacccagagcgacgtagtacgtggtcagttccaacaaaatggaggaactccttgactttatcaggcagagttgcgtacgagtcctcacagtccagtgcatctgtaagcaggtcgccgaatttcttctgctcgtacgcgatcgcttcacgagtttcttcgtttgcatccgctggaacgcgacaggccgcaaaaagaacgcgtaaactgtttggtagactctccttgctagcccatgtctgacgaatagcctgtcggaatgggaacccgtcgatgactcgggtcttgactccgataaccacgagcggggggtccgtggggctgttgtgcgctggttccgtcttgatgtcgtcaacaggtcgagagtcgccagtggcagcatcgacctcatgtgtgacataggctgagtcttttccgttgccgccactctgtccttgtttcctcaggcggtaccattccacaacgcccatgtcttcttcgccagtctgagctccgtagagcgcgagatcatccaggcgttgttgctttagtacagcggtgaaatcctcagtgcttaggatcgtgaaggccaccaactctgactgcatcaagtgcttccccgtctctgtcgtcggcgagtcaaagagcacaaggcgcgccgtgtggttgccaacgtcgatggcctcttggattagcgtcccgctctcaatggggatgcaccgacgccagctgccgtccagctgcagacacagccaccggcgaccagcgtacgtctccatcagctcgctgaagtccgactgcgtgaccagtctgaagcggaatgccagcggggacctgtacactgcgtccggctccgggtagaccatctgcagccccttgagcagctcctcctgctgcacagggggcggagcgttcacacctccggcatgctccagagtcgaggcgccagcaacagcaacgcagcaatacgccacacagagcaacacgcttgcaagcatgcgaggcgtcgccatcgccatcaacagctctttgctcttggtctgtttgtggtcaaaagtgctggaagatcgcgatcctagaaaatagaaagggcgccgatatggctacattttcatgttgaagccatcttgtccctacactactgatcctacgagagccttgatgcccggttgaccttatcccttgatgccggcatggcgcgccacgagtccggaagcgatcatgtagagcacggcgctaatgacgctgaggatgaaggatccgttgagcgtcacgtcgtccgccttgccgagcgggtgcgcctgcgggatccacagcgcgaacgtgagcaccgtcgatatgagtgcgatgcccacgaaaactttgccgcccagcacgaagatggagcggcgcttgcagcacgtgataccgagcgcgagcgccacgaaggacagtgcgcccgcgctcatgctgatgcctccgaaggccagcgtggcgcttcccagagctccgcacgacttgtggaggaacttgtcgaactgcgtggcgtccatgccggcggtggtggccagtgccgcggcgaacgcgagctgcgtggcgtcgctctcgtccccggcgcgactgtagccatcgcacacgctgtagtccgagaagttggacatgaggtccgagtccagctccgtcacgtcgtacttggaggacgtgtggaagaggtagcagtggtcgaaggacgcgctggcgttggcgccgtcgctggccgacgagaactctacgtccgtgcagaagccccagacgcccgcggcgaagtcggagctgtccactgtgctctgcagcgactcgttcacggtcgtgcttgtggtccagagcggcagcgagaaggccacgatattgagcaccacggccgcaaacagcacgatgagcgagatgaggccggagcacgagcaggccatggcgatgtcgtttacgtcttcttcctcttgcgcggcagatcacggaatgacacgcgctcgactcgaagcgaagcggcgggggcgccgcaagaagctcctgagtcgcacccatgcaggaagcattttaggtctcgctaccttgagtcaaggaccttgactgcgtccggacttgctgtaggacatacgacatgctgtcggtgggtttgctttcgttgtgaggcgctagtgaaggtctcgacccccactttgtattgtgcccgaggcggttgtcgcggtgaaatattcgaggtggatcttgccggcccggtctcatgttggaacgctcagttggccagtgctataccgtgcctttattaggtcggtagaacttgcttgttgatccgcgcgtgggctatacatacccgttggctcttgtgagctgtggctgggtgtggcggactttctcgaacttctcgtcgccccgttgcccagacacttctccttttactcaacttccaggtgggctctgtgcctgtgcgtgtggacgcgactcggaccatgctgtccttgtcctgcggcagcggcgcgtcgccctcgacgccgacggcactcaagatgccgtccacagtggcgccgcccaccaagcgcctcgcgtacgagactttcctggaaaagcgggcgtcgtgctccgacctgcggcctccagtccatcaagcccaagctacgactcaactggagcgagcgatgcgcaactacgacaacctcgtggctcaggtgcggcctctggagcagtccgagccgctgaacgacgcagcgccgtcggctctgatggagatcatgcgcacaccggacttgaagacgaataaagtgcggaagagcaggagcctcgcgctgccagcgctgcccagcgtcgacctggacgagatcgagatcccggaaatgcacgaaggcctgacacgcgtcttctgccagcccaactcgtggtcgccagcgttcgcgtctccgggtgacttcaccatcaagatggcctcggtcttccaggacaacggcgagatctgcttccgcatcgcagtcatgtgctgctgcgccaggtccatttgcgacggctcgcgcatcaagccggcctccaagcggcagtactacgtctcgtacgttgagcgcacgcagcaggagatcgtgcagctgacggaagcgctctcgctccagtatctaggacaccgcctggccgacaagatgcccacgcacgggacacgcctcatcacagcgcgcagacagcgggatctcgacgcgtacggcgaagaagtgatcaagttcctgagcttcgtgatgcagatcaccgagatcggcttcaacgggctcgtggcgctcaaggagcccgtgtcgagcaatgttcggatacgggactttctgggcctcgcgcttggctttggagagcagacgatcgtcgcgaccagctcgtgtgacgcccgaatcgagggccaagatggcggcaatcgccccgttctgcccagtgcctggctcgacatcgacgtgagcatgtcctcggatgccagcttctacgggaaatggtacagcacgaagaagtctccgcgggacgaagcgctcgcgcgcatgttcggtcgcgcctacgacaacggcaacacttgtggcgactttggtcccttgatgaggacgaacagcatgcatcggtcgggtgctggcaagtgtgtgcgtttcgtggacccctgctattggtttgacgaaacaccgaatgacggagcgttcacagtcgagatttccagcgtcaccgtcatggacggcgtcgccaagtatgctatcagcgtgctgttctacgcgaacggcgagctgcaagtgtccactgtcgaccgccgctactccgagttcgaccagctggccgtgacactggaggagaaggtgtcttcgctgcagatccgcaggctgctcccgccgaaaaccttcttccgctatttatctgcaagcttcctggagcgccgagctgcgtatctgcagctcttcctcgagcgcgcgctccggctgagcttccagggcgtcctcgaccaggagattcctctctcggcggagccgcacgtccgcgacttcctcaagctgcccgctgtcgagtggatcgtggtgccctggagcaagcagtcgccaactcccaaggcgcgggatgacttccgctccaacttttcgctatccccgacggcggcgtccgagtcctcgccgcgcttcaacctctcaccacgccgcaatccgcgcagcagcgccgtcgaatcagcgcctccacgctatgagagcctccagctcaagcgaagcgactcaatgtgaagcaagtaccatgaacgctagcaaaaccaacagcaaaaaaagaagtaacgttaatttatgattaagcttcaatctgttgcactctcacacatcgcagatctgcgacttgtgagagcctctagtatttcattcgatgccagaaggcaggtcaaagttgcgaagtcggccccgcagtcgagcatggagaaggccgaggtcgacgagctgcggcagctctcgcagcgcgtgtgcgagaacgtgacggcgtatgtgggagcccaactcggcggtgagtccgaggcaaaagattgtgcattgccagaatgagcggaggcgtcgaagcagcactctgaagtcaaactgctgctgctacatgtactgctgctgctacatgtactgctgcttctggtctctggcgcaggctcgctggagtcgatgcagctgatggagacggtcgtgaacaacatcaacgccaagtacaagggcatgaagcgcgaggccaagagcattggcaagttgtccaaggtcctggaggcgagaggtaaccaacgcactcagtgcacgcatggttttggtggcgttgtagctgatacattcgccgcggacgaggtgtgcaagttgtctaaccgttgctgctgctgctgttgctgctgctgctgtctgttgtagcatctgcgaacgaggagaagatgaacatcatcgacgacatcgatgaggagctctcggagctggaggacatggtggaccagctcgagcagtacacggggtcgctgggttcgtgctcgcatggtcgttgcaaggtgtccctgataccgcagcgttctctgacttgctgtgaccttgtctctgatgtctgcagagatcaagtttaatgaagtgcgctagacaccgagtagcaagtagattggaaccacaagaggtgaaagtgcgctccctcttttcttgttcttgtcctcactggtggtctacccacatgcgtgcgccgtccaccgaaaccaaactgaccccagtcgccaggtgcatattcctgcttccgcccagcgcttcctggccatgaccgcttgctggtcgtccgaacgtagtggcacttgacttggtttcagtatgcggctttcgcttctatttttggctctgaattcaagctggaacgcgccacaacggctaacggctgcatggggcactcgcagccccttcacaacactcctgggcctccgtctcgcaggccccgccgtcctcacctccgcccgccactaacactgctacaaaactacaagcagccgcaagatgtccaacatgcagaacatgaagtgtgtcgtcgtcgggtgcgtactaaagagataaagtaaagtatcttgttgggctggctgcgcggctggtcactgacagcgtgaactcccatgacaccagcgacggcgccgtgggtaagacgtgcgtgctcatctcgtacacgaccaacacgttcccgggcgagtacatccccacggtcttcgacaactacagcgccaatgtgatggtggacaaccggccgatcaacttggggctctgggatacggcaggccaggaagactacgaccggctgcgtccgctcagctacccgcagacggacgtcttcctcatctgcttctcagtcgtcaggtgcggcgtctactagcgctaccggagggggattattacatggcggcagtggtggggctgacccatgtgcattttggtttgctgtgcagtcgcgcctcatttgagaacgtcaagctcaagtggctgcccgagatccgccaccacgcccccggcgtgccctttattctggtgggaaccaagtcggatctgcgtgacgacgaggatacgctcgagaagctccgggagaagaagctagctccgattacgaaggaagatgtgcgtggctccagtgaaggtgagagggtggagacgctcaactaacagcttggtattttcttcagggtgagacgctcaagaccgagctgggcgcgtacaaatacatggagtgctctgcgctgacgcagaagggtctaaagtcggtgttcgatgaggccattcgatgtgtgatcaccaaccagcagaaccccaagggcaacaagcggtcttggaagtgctccatcctgtagagcggcgggcgtcaactgagtggggccgggcggcaggattattgcattcacggtcctcatttgtcccctttgcaccgatttataccgtccaaaatctcgtcgcccgacctcccaaacaattaaactcaaatgcaccaaaacttcttgcattgacttcaagcttggatggctacattatgtccaccacatcggtgattccaagtatactggagccaagtcaatcctaatccgagcccgacgtgatgactgagagctccagcttcacgtcgtggctgctcggcgcggtctacacgggcggcacgctctgcgtgggcgcgctcttcctgctgtacatgtaccaggagcggctgctctacttcccgacgattcctggcgcctccaagttcaccgaggacaaccctcccggtgcgcaagtggccggtcaatcccctgcttgtccagccctgtaaggctgacgctttgtgctctccaaccaacaggataccgacaccccggggagtttgggatcgactatgaggacctgatgatcccgtgcaaggacggcgtgaggatcaacgcgtggctcatgaagcagaaggaccacaacatccgcccgacgctcatcttcttccacggcaacgccgggagtgagtccgtcgcaagctttagcaatgtattgctgctctgttcggacttctgaccgtgtgctggtgtgctgtagatattggttaccgtctcccgaacgccgtgcagctgttccggaaggtcggggtgaacgtgctgctggtggactaccgagggtttggccacagcgaaggggaaccgactgaacaagggctgaagctagatgctgaggtgcgtggcgatgcagtgagcttgacacaaggttgtggttattgagaacgagtgggatggcgctctgggatgctctgactgacaggctgcgttggacgccatatatgctcggacggacatcgacacgtcgaagctcgtggtgttcggccggtctctgggtggcgctgtgtctgtccacctcgccgagaaggagccttctaaagtacgtgtgtgatagaacgcattgtaatgaggcggtggtatcactcacagattggctgcttgtcaggtggcggccgtcgttctggagaacacgttcctgagcatttccgccattgtggacgtgctgatgccgttcctgacgtacgtcaagccgctcgtgctgcggatggactggaacagcgcgaagggcatccagaagatcaagcagccgatcctcttcatcgcgggcatgcaggacgagctggtgcctcactcgcacatgcagcagctgcgcgctctcgccacctccagccagcgcgcggtgtggtaccccgtgcccggcggcacgcacaacgactcgtggctgcgcggaggcgacaagtacttctcggagctgcggcagtttctggaggcgttgggcggcgacaccacatgtctggccagcgacgagtcctcgggcgaggacggcgtcgcccccgaggagaacgccatcccggtcatgtaccagcagccgctgctcagttcgctccagaagcccaagacggagtaaagagagaaagaggaggaatagagctgcacaacctcacgttgctacacacaagagagccacgttgaagtggtcttatcctcgtcctcccattggctgaaatgcctcacttcacgtcggaatcccgtcgaagcctcggcaaagggcgtacatgtgcctgggggcagatctttcagcactttcgaatcctgcggcgagcgcgcaagcaaagcaagcaacgtcttctcgtcccttcctctctctgttgcgtgcgcgatggtgctgcagacgagctccatcctgcgtcgcgccgcgctctcggcgcgcatggcgtccgtgcgcgcggtgtccaacagcagcgccgccgccagctcgggcgcgttcctgacgatggagacgcgccccaacggcgtggccatcgtgcggctggacgacaaggcggccaaggtgaacaccatctcgtccaagatgacggccgagatgacgagcatgctggacgcggtggagagcgaccccaacatcaagtcggtggtgctcatctcggccaagccgggcgtgttcatcgccggcgccgacatcgccgagctgcaggcatgccagacagaggaggagatgcgcgccatgtccagcgccggccagagcttcatgaaccgcctggccagctccaagaagccattcgtggcggccatcgagggctcctgcatgggcggaggcctcgaggtggcgctcgcctgccactaccgcgtggcctcgcagagcatgaagacgcagctggcgctgcccgaggtgatgctggggctgctgccgggcgctggaggcacccagcgtctgcccaagctcgtgggcatccaggcggcgctggacatgatgctcacgggcaagaacatcaagccggacaaggcgctgaagatggggctcgtgaaccaagtggccgacccgtacgctctggagaacgcggccatctcggcggcccagcaactggctgcgggcagcttgaagcccaagaagaagagcaaggggctcgtcaaccgcatcttggaggacaccccactgcgccaggttgtgttcaacaaggccggggagatggtggagaagaagacgggaggacactaccccgcccccaagttgatcttggaggctgctcaggctggagtggagcagggactaaccaagggcctggaggtcgaggcggccaacttcgctaagctcggcatgaccagcgaggccaaggcactcatgagcatcttcttcggacagaccgcgctcaagaagaaccgctacggcaagcccgcgaagcctgttgagaccatggctgtggttggcgcgggtctcatgggagcgggtatcgctcaggtgtcggccgcgaagggtgtgcgcgtgctgctgaaggatcgcgacgccgcagctgccgccaagggcgaagactacgtgcgcaacaacttggaccagaaggtgaagcgcaagcgcatgacgatctacgaccgcgacgccgtcatggccaacgtggtgcctctgtctgatgaggacgaggtgtggaagacgcacatcaagaaggcggatctcgccatcgaggccgtcttcgaggacctggcgctcaagcacaaggtgctgtcggacctggagaactacgtgtcgaaggactgtgtgatcgccacaaacacgtcggctctgcccattgcggacatcgcgtcggcgtgcaagcgtcccgagaacgtcattggcatgcactacttctcgcctgtgccgagcatgccgctgctggagatcattcgccatgccggcacgagcgacgccaccgctgcgaaggccgtggacctgggacttcgtcagggcaagacggctatcgtggtgaaggatgttcccggattctacgtgaaccgttgcctcggaccctacattgctgagacgctggcgctggtcggagacggcgttgagcctgagaagctcgacaagctcatgaccaagtggggtttgcctgtgggtcccatcactctggctgacgaggtgggtctggacgtggcctaccatgtgaaccagacgctgtcgaaggctctgggcgtgcgcatggagggcggcgacgcgaagctgttcgaagagatgatcggccagggctttctgggcaagaagtcgggcaagggcttcttcgtgcagcctccgaagggcaagaagggcaagaagaccatcaacgctgacgccatgaacctggtcaagaagttccagaagaccgatctcaagctcagcgacgaggacacggtcaaccgcctcatctcgcgcttcgtgaacgaggccgtcctctgcgtgcaggacgacatcatcgagtcgccgacggagggcgacatcggagccgtgttcggcatcggcttcccgcctttcatcggcggcccgttccgctacgtggacaaggtgggcagcaccaagttcacggagatgatgcagcgctacgcggaccagtacggcgagcagttcgcgcccgcaccgctgctgcaagacatggccaagaccaacaagaagttccactcgaagtaggattgacttggattatataggctgcggcgttgataataatctcgaaagcagagcagaagcaaatgcgttgaatgcagaatgacatgcacattccatttaatgtttcggaggtttggatcgccgtcaacgttgccgttgcactgatggtattgcgccacgtttcgttcaagaggagacaccagctctctgatgcaggaggaaacaggcaggggttatctcttgtccttcctgaaatcatgcaagatcgacaacgtaccagcttagcctgaaccttgttctcacgctcctggctctgacgacgtaggtcctccacgcgctgcagcttctcatccagttcaaccaccttcaaaacgttaaggttggcagtgagttagactgaccataagccctcaagtctgctaggtattgctgcgtacctggtgcactttgaagcttccggagcgactgggctcggaggctgccgcgttagctgactccagtagatcctgcttcatccggcgggccaaagcaatgcgcaacgcattccggcgttcttcctcctccgccttcttggcttcctccgaagtgttgctctgcagcttctcaacgagctgcgccggtggctctggagctgtggccttctgctcctgctggtattccttcaactgcgcctcgcgctcgcgtttcttcttctcaataatgcggtcgcgctgcttgcggagatactcttcacggcgcttgagctcttcctccgagatctcggctgcctgctgccactcgcgctgcttgttgcgattctcctcgagcgactccttgttcttcttgcagatctcctcggccttcttcttgctctcgcgaatctgctgctgcacctcggcgggcgacagctgccgcgtctcggacgcagcgctcgcgtacttgtcctccgcaaccttagcagccaccgaagcgagccgaagctgctcactctgcacactcatggacatggcgagcgcggcctcgagttccgcctgctccatctcctcctgcttgtacagcacgctgagctccatgaactgcgcctcgaggtcgtgctcgtcctccgtcacctcctcacgcagctccttgatggcctcaagctccagctccaagttgcgcttgaccatgagcttcttgaagctcaggaagtcgtccatggctaggatctggttcaccacgtcagcactcacaccgtcggacacggatacgcccgccgctcgctcgctgtcccgctgcttctcgcagatagacgcaaagtccgcggccgtgagccccatctcggccaggtgcgagcccagcacgttctccaccaactcgcggaactgcgtgtgcagctccgtgtagatgaacttgttctcctcgcccgtgtcgaagctggcgcagttgtcatcgatgaagcacatgaccggcagctcccacgccggcgagcggaacaggttcagcacatagtcgaaaacccagtcgctctcctccgctgtgaactccagggcgctgtcgctcatgatgctcgtcgcgtgctcacgctactcactgccaccgagtcggttgtgcactccggcggtcgcgtcgcttcgtgctcaagatccaagttggctacacttttgcagaaactgaaattagtgaaaaggggttcttgctgcggaactgcattcacctccaggctaatcgccaactcgccgttctcactccgttcatctgccgtcgcaggtcacgccgattctgtcatccggcttgacccgaagcgcaagccgcggaaaactccatgtcgggaacgaataccccgtttgtctcaagacacctcactgctccatcgacccaaagctcgatagtagatcgggtagtcgaatgatggtgcacagaggacaaccccaacaccacgaatcaaaacgctcaggtcagagcgttcacgacaacatcagctgacaaattcctggcgattctagacaaactactggttcgcgagctttagaagccgcttgatttgcagttcggtgttttttgtagttgctattgcagtacgctttacatacatttagtagttattgcggtccatcaaccactcttttgactgcaatagcagtatgcatggcttgcctgcctccgcacgatgagaaatctgactgggttgtgcgcaacttgtgtaccttaagactaatgttgcctggtgtagcgtgaaggttgcttaatgtcgtttgatgacaaactcgcctggggtggcaagcacagttcttacgaactgcgagctttaagtatacagtccaagtcccgctccaagcgaagctctccgcacaaatgcgcgaaacaggcttacccctcgatgcagatattcgctgaaaacgctgttatccctgtttgttcatcgaagtgcctttcagctttggacatggaaaatgctcaccagacagcggaaagaccttcaaatctgaattcaatagactgcggctccatatttgctcgaaccgtaacatatcaacgagagggaaagtatccaaggtggatgcactaagttcacggagatgatctactgtagcggtacgcggaccagtacggcgagcggttcgcacatacgccgctgcaagatctagcccagaccaacaagaagttccactcgacgttgcattgaactgtttgatataacaacaagagcgtttaccacttcgactagacgagatgatatcctctcctccgccacgtttgacaagttttgatcgtgtcctttcgtggctcatggctacacacttgccgcgctgtgattcgcccaagcgcctttcagcgaatgaaaagtcgcggcgaccaccgattcgccgaaaaccaaaagtcaagatccatccaagcttaatctaatcctaatcctccgttacaggcagccatggaggagggcccgatggcatcgaccaagctctacgtggaggagggcccgatggcatcgaccaagctctacgtgggcaacctcttctacgagctcacgcagcgcgacgtcgaggccgagttcggcaaggtacgcagggcagcagccttccctctccagcctctgtatacccccctctaactcagcctcctcttcgtcttccccttcgtccctgcagttcggacccatcgagcagtgcgccgtcaagaaaggctacgcgttcgtgcactacgagcagctggaggacgcggagctggcggtgcaggagatgaacgacaaggagctgggcggccgccgcctgcgcgtggcattcgccgtgtcgcacggcacgcagcgccgctacgacggcccgccgccgcccctgcaggcccccgccggccagccccagcagcagcagccgccgctgctgcacagcccgcgcttccccgtgaacgcgtcgcccaacctgttcgtggccaacatcccgccgcacatcaagatgagcgagctggaccaggccttcgcccagttcggagaggtcaagaacgtcaaggtgctgccccaggcgcggcccgacgcgcccatgtccgccttcgtggacttctcggacgtggcctcggcccagaaggcccacagcgccacgattatcgtggcgggccagcacctgcgcaccgactacaacttccgcaagtacgtggctccttggtgtgagcgcgcttgctttactggtgtgtgagctgactgttgtctttgtttgtggtgggtaggaacaagggtgacggaccgcgtcgcatgaaccgcggcagcttcgacggcaatggatacgaggacgaggagcgtggcgggggcagtcgcgcgcgctacgactcgttcgactcgcagtccgggcggagggaccacgtgtccagcagatatgaagacgagttcgaggacgcgggccaccggcgccaccaccaccaccgctcgagtcgtccccactcgtctcggcacagccgcgaggacccggaggagcgcggacggagcggctccccgccgcgttaccgtcgtcactgtagcagcagcagcctgcggagaggcgaggaagccaccggcatgcgcgagcgctcgcgggactacggcggtgagcgcgcgtacggccgcccggatgaggtgaacgagttccagccgcgttcgcagcagtctggatactacgagtcgcgctcgcggggcgagccgcgcgagtactcgggccgggggatggacaagtccccgcaggagtaccgtcgctacagtcgtcctgagatgtcgtcgtcgcgccacggatcgcgtcggggcccgcgcaacgaccgcagctggtacgaatttgtatgtcaaagaggtttggtcgtggccttcaatgacctgtgtatgtcttgcttgatttatggtttggacaggtctcctcagccccctcagtctgggcctcgtagtcgcagtcgcagccgctaagcatgagatggagcgctgtgcgaagctttaccgcagatgtgtgggtggtttggcatctactcgtgtgcgggtgcaaactaaagcggggtgttggaataccggagtacgccgtggtggagttacgagaagcagccccgttgtatttcggagggcagactcgaattgacgaaatggacaaaccttatgtggtcgcgatgtgttggggccacaactgctagctggcgtccgcgttcccttttcgtcgtcactgggtctgttagtgtttggcacgccaagaacttggagcttttcttttactcattggatgtggccgtagaatgtgggtggtttctcgttgttacgctctgggattggattgtatagaatggatgtgtaagtaaaaaaaatggatatgcatctccgccttggtagcgttcgagctcgagtgcatttgcgaattctccactggccgcgcactgcactcaacaacctcaccaccccagctcaagatggccaataagctgctcctcgcaagcgttctcgttgtcaacgtcctccaactcgtctgtgctggccccaccgcgatggagctcggcgccggcgcttccgcgcagactgcgtgctgaagtcgactcgggctcgatcaattcaagtggcagtgctttgttcgagaaagaggggcaccagtgcaactttctgggatggtttacctacacgtgctactcgtggttttagacccaaaacacaggtcacgccttcctcttcgcggccattctgagcaaatgcggcgaggttgttgagtgaagtgaagtgcgtggtcggcggagttttctcaaatgctctagcctatcgatcggcatccagcaatccggtgggcgaaagcagcaacgaagcccacccacattctaaggtaatccaacaagaacgcccagaaatcattgagttccaccaacctagctgtagtggaacaggctcattcagtaagctaagtgacagcgaactcaaacaaattaaagtgcattttcaataggagacgttcttgcggtagtcacgatttctagtaaactctacatcatatcgtgtagaaaatatagatcctgatgacagtaacctacgacactgtcatcgactgcagctccaccatcccgcggtagacgccgcccgtcacccgcatcagctcctcgtgactacctcgctccactatcgcgccgtcacgagtcaccgcgatcacgtccgccttccggatcgtcgacaaccggtgcgccaccacaatcgtcgtccgccgcttctgcgccatcagcgcgtccagcgacgcctgcacgacctgctcgctctcattgtccagcgcactcgtcgcctcgtccagcaacagcacgtccgggtcgcgcaaaatagcgcgtgcaatggcgatgcgctgcttctggccgcccgacacctgtgcgccgcggtcgccaacctccgtgtcgaaaccccgcgggaagttggagatgaagtcgaaggcgttggcgctcctcgccgccgcctccacctccgcgcgactcgcacccggcttgcccagagcgatgttgtccgcgatcgtccccgagaacagcaccggctcctggctcaccagcgagatgcggtcgcgcagccacggcaagctcagactgcgcacgtcgtggccatccagcgtcaccgcccccgacgacgggtcgtagaagcgctccagcagcgcgatcgccgtgctcttgccgctgccgctcgcccccaccagcgccacagtctggccgcgtcgaaccgacaggtcgtagccctggtagatggcggcgtgcggtcgagacgggtacgcgaaggtgagctgcttgaagtcgatgtcgccttggatacggggcagcacggtccctgcggtcgaagtggcgtcgatctccggcacgcggtcaatgatgttgaagacgttggcgacggctcgcttggccttttccccgtccacggatccttgcgaggccatactgacactgaacgaccccatcatgaagaccatgagaacaacgagaaggtcttcgaaggagatcgtaccgtgagagacccagatgccaccgatgtagaagacaaaggcgaggacccagaacgtcatcgcctgcgatagaccaaacgatacacctccggagacgcccaccttcttgtcttgctcattcgacacgttcaggaacgacgtgtactgagccaccagagccttctccattccgaacgacgcgaccgtgcggattgaatcaatcgcctcagaaagcagagacgccgctgcggtatccgcgtcgttgttcttctttgcgttcatttggccggccatgtgctgcaagcgtacgcggttgacaccgacgaggaacggggtcgtggcgatcatgatgagagtcatctgccagctgtagtagaacgcgatcgcgaagatgatgatgaaggtcgtcccagtcattaggctgcggttgaggaaatccgacgtcatggactggagaatagccgaatcggtagccagccgagagacgagggagcccgacgagttctccttgagatcaaaccacccgacttcctgacgcatcataccgctgtacgcctccaaacgaactcgactgatcaaccgactcgaagcgatgccgaaccaatactcggtcagcgtgaaagacgaaccgcaaacaacagcgaggcacccgagagccaacgagtaatagcgcatgtcgtggagcatttcgtgcttcgtcttctggagctcaaagtataggtggatgatcttggcgatgaacatacccgcgagcgggtaaacagagcccttgaacacggaagaaattccacccaacgccataaacttccactcgggcagccccatcttccagatgcgcagtgacgacactgctgaagtgtccacattatcgcattcgcattcgctggcatcgcttccattgtagtcgcccaattccaacgcgctcgacttgctggaggccctggtagatcgaaccaaatgagaatcctcgtgattgagatctgttgacgctgctccatccataactggagtggattcggtcgtgtcaccttcagtggctgcttgcgtctgagcctccagcaaacgtcggtagtggccattcgggatacgcagcagctcctcgtgagagccaagctccacgatgcgaccgccgctgtgcaccgcaatgcggtccgcgtcccgaatcgtcgacaagcggtgcgccacaatgatcgtcgtgcggttcaaccccgccaccaactggtccagagacgcctggacgatccgctcgctctccgtgtcgagggcgctcgtcgcctcatccagcaacaggatcggcgggttcttgatgatcgcgcgcgcgatggcgatacgctgcttctgacctccagatagctgtgcgccgcgctcgcccacctctgtggcgaagccctcggggaactccatgataaaactgaaggcgttcgccatcttggcggcctccacgacctcgctgtccgacgcggcaggtcggccgtggcgaatgttctccatgatggtcgtcgcgaagagcacaggctcctgccccaccagtccgatctgctgccgcagccacttgacgttcagcgagcgaacgtcctccccgtcgatcttcacggagccttcgagcgggtcgtagaagcgctccagcaacgagaccaccgtgctcttgccgctgccgctcgggccgaccagcgccaccgtctcgccggccttgatctggagcgagtagcctcggcacacgtccacctcggggcgagacgggtacgcgaagcgcacatcgtcgatgtcgatgttgccggagacggtctggagcttcttgccttcgtcgtcattggtggggtcgatcagcgacggccgcttgatcagctcgaacacgtcgtacgcagcagcgcaagccgagtagaccgcttggaggttgggtccggcctggcccaaggccatcgcaccttgcatgacggtgaaaaacaccgtgagaactctcccgccattgtagcagcccgagccagtgcacgtgctgtcgcccaggttgtcgcgcgcgatgaagacagccccgatgaagaagcccagcgcgtagttgaggaagaccatcatgtacgtgagcccgctgccccaaccgacagcgaaggccttcttgatccctgcgcttgtggcgccttccagcgctcgactgtacttgtctacgaagtgcggcaccgagttgaacatgtgcactgtgcggatgttgctgagcgactcctgtgccacagctccggcctccgcgtacgactgcatgccgctgtgcgtggccgcaacaatgaccttcttggccagcatgccgcttgtggcgacgaacggcaccacagccagcaggatcagcgcgagctcccagcccttgatgaacgcgatgacaatgcccgagaccaccgtggacgtgaagtgcagcatgtcgctcatcttggacccgatgccgtcctggatcgtgacggtggcgtcggcgacgcgggacgacagctgcatgggctcgttcacgtcgaaccaggcgatctccttggtgacgatggcgttgacgtagaggctgcggatgcgcttggactggcgcgaggccgtgaccgtccagcagtagacctgcaggtaggccgtggccagcccgaccgcacccacgatggtgaggttgcgcgcgactcggttcacgctgggcgagatgtcgctcggcccgccgcccgcctcactggtggagccgaaggagttgatgaggctgccgaagagcaggaccatcacgggccgcagcgcgccggcgcagatcgccccgagcgtgcccacagccatgagcagcttgtccgtcgagtcggcgaagcagaagagctccagcagcggcacctgcttcctggacggtgccgtggctgcagaagtagtagaagcagcatcttcgtcggtgaggagcttcgtcgccgcggcgcccgcttgcgatagtcgcggcgtgtgcacttcaacatagggcggggacgggtcgctggctggtgcttccgatggtgcggccatggtcgtggtggcgcgaggctggcgagtcgagcttggggggttgagtgacgcttggggtggcgtttgcttgggcgctgcttggcaagtcggcgagtgaggcgaaaggcaactggccccaagtccgggtgcggtacgccccgctcacgtgagtaaacggccagtgcaggtaaccgcgagattgctgcttgtgattggctcgctgcttgtgattggctcttggactggcggcgcaatccacgaacaacactctcgccgcacgcgtcaacttcgcccccttaataaggactcgaaccccttataagggacttataagggttctagttcttgcggactgcttgctgaggcagctcacggacttgtgtgatattcgtgccagccgacgttccgcacactcaacgccatttcatttcaccggctccaacatcaagcgcgtcaaacgacctccggtcccaagtctctgcgaatcgcctcctgctcgtgatactaagctggcaaagctggtcgtgatggtcggaatacacattgagcatttcatcatacgcaccggcatctgtgagcaaagactcacaatatggacaacctgcttcgcaccaaacgtcagactggatcggcacgcgcgacgctctcatttttaagcttcacccttgtgtgtcgtaggctacgacagctacgactcgtagctccaggtaacaagccaagtaggattctccctcttcgcggtacggtagaggttctctaccagagaaccagcctcgttggaccagagaaagcgtccagcccacccctgccgatggccttcagtctgtcgcccggtgacgtcgccgaaactccaccactctgcgtgttgggttaaccattttactaccagaggttcactgagcctcgctcgaccccgctcgcgctctcgcagccactgcagagcgctgcttgcggcccgcaagttgcggaccttgatcaccgcgaccagattttcgccagtttgccggtcacgctgtaatagcgatttgtatgggtcgagtaggttgaaggaatctgcgctatctaatcctggtcggtctatgctcgcgacactgacgtcggtcacttgggctcactcccaattccggccccgaccctgcctgaccctgctccgcgatgcgctcctcgctgctagcggcgctggcggcggctctgctgccgtggggctccgtcgcctcctcgtcttcctcgtcgctctcctcctccgccaccgccagcagcggcacgccctgcgatccgcactacgagcggcgcaacgccaccacgggccgctgcgactgccgcgagggcttcagcggcttcggctgccgcatgtgcacggccagcggcgcgctggacgccgcggcctccgacgtgtgcggcgccgccttcgggcccgactactcgtgcgtcacggggctccgctacgacgcgcacgcgacgctcaagacgtacggctgctcgctgtcctcggacctgcaggcgctcttcccggacggcgcgatggacgtgcgctgcgaccgcgacgcgcagggcgtggccaactgcacggccgccgtgttcaaggccaaggagacggtgaacagcgtgcacgtcattgactgcaacatcacgcagtgcgccttcgcctcgggcgacgccgacggccagtgcgcgcagatcgactgcaagtgcggcccgcagtgctcggccatgaccaaggcgctcgtggagagcacgctgagcggcaagcccgccaagatcgaggtcaccaacgcgacgcagctggccatcgtcatcgagggctcacccatcccgctgtcggccacgtgcacggcgtcggcgtgcgagcgcactgggggaggcagcagtagcgcctcggggagcggcagctccggcggaggctccggggggatcagcggcctgtgggtcgccattgtcgcgtgcgcagctgtggcggcgacgctgctgctgtgcggatgcgcgtgctcctgctgcctgactgcgagcatccgccgcggccagaaggaggacgtggagacggagatcctcaagttcacgtcgcgatcggcaaatgtgctcgagttccgtcatctgagctgctacgcggacagtagcggggagtcgtcgacgacgacggctggcgatgagcccaagcgcattctgcacaagatttcgggcagcgtatcgcgcggccaggtgctcggtctgctgggcccgagtggctcgggcaaaacgacgctgttgaacgccctggcagcggtggagaacggccggtcgcagttcgctggcgagatcttgctggatggcaagcagctaccgaaggaataccgccggattgctgcctacgtgcagcaggacgactcgttgtactcgacgctcactgtgcgcgagtgtatttcgtactcggcccagctccgtcttcctccgacactgtcggatcgagtgaagaatgcgatggtggatcgtgtcatcgcagaactcaaccttactcacgtcgcgaactcgcgcattggctcggtcggaggaagcagtggacgacgcggtgtgtctggcggtgagaggagacgcgtgagcatcggcatggagcttgtaacatcgccgcagatccttattctggacgagcccacgtctgggctcgacagctcttcagctcactcggtagtgcagctcgtgaaggatctggcaggtcacgggcggatcgtcgtgcttagcattcatcagcccagcgcgcgctctttcgtgttactcgacaaaatcatgctgcttggaaaggggaaactgctgtatagtggggctcctgctgaatccaagagttacttccaagatctgggtttcaagtgtccagaggtatgtattggtgttgtatttccctccgagcgttgatgttcacgttagattatctaactgcggggatgtcgtacgtgtgtctacagcacgagaacatagcggacttcattctagacatcgcgtctgacaaaaacaacatcccaatgatccggtcacacatgaagcgtgaaccttctcccctctcttcaaaacctgcaccaatggcgtcaagttcgcggattcgattgcaaaacatcaccccgctattcaccatcggcagcccgacgccgagggcggagtcttcaccgttcatgaaggaggaggtgtctcttgacacgccgcgcatggacaacatgttagcgtcgccggtgagtgcagggacacccaaggagccgagcacgttggggataccaactacgcctggcacgccacgcagcccaccaccgctttttatggctgagaccgagacctctccccgatcgatgctcattgagattcgagtactctttgtgcgaacggcgcagaacatcctccgtcaccgatcgctgcttgttctgcacattgcgctgagcttgtcgctggctttgtttggcgggctgatcttcaaccacgtgaccaacgacctcgctgggttccagaaccgcatgggcgcattttacttcatcctgactttctttggattcgcgagcatgagctccatggacctgttcattggcgagcgacccattttccttcgcgagaccggggctatgtattatggggcgttcagctacttccttgccaaggccaccctggacacgatgttgttgcgggtgctacctgcttcgctctttgcgagcatcttctactggatcatgggactgcaagccaaaacggagcggttcctattgttctcgctcacgttggtgctcttcaacgtggcggccggtgctatttgcctcctggttggcgtgctttcaagacgtgttgggcccgcaaacctcggagcgaccgttgttctgctagtcatgctgctgtttggcgggttccttctcaactcgcagaccatgccaacgtctgtggggtggctcaagcacctatcaatcttcagctacgcgttcgaaatcctcatgaccaacgagctgaaaggcttgattttgaagttcgacgctcccggatacccggcagttcctgtctacggtgaggtatacctcaagactctcggcatggactatgccaaccggtattacgacgttaccgcgctcgctctcattgccgtgagtttgcaggtgctagcctttctcttcttgtcgctgcaagtgcctgtaaatcgcgacatggccgaccatgacgaagacgaaagtgagggtccactacccccacgcaaagaagaagtgtaagttgatggaaaattgaagttgtattcgcattcttgtcgccacagtggggctatgcttcggctgggatagaaatttttagctaggacattcaccctagcagtacggtagtagtacttctctgtctgatgaggcgttgggtgcactgcggactgcgtgaagtcatctccaagttggtttcatctaacgacagcgctttcgctgagcccgggggcatcttatgacgagcgaggagcagtgtgagcctcgcgtttactatctgctgttttctcctgtttaggaagcgataagaagcgctataagtgcaggccactttgtgagcgattcctttatgagagctctggcgcattataagttcatagtatttgcagacttgttggcagtttgtgcgacttcagtaagtcacttcgaggcgccccacctcaatccaaaggtaccacacgctgtgggcctcttacgacctccgcaatagcagatgtggatcccttagatggcgaaaattgtgatgaagatgatgtcgaggagtaccatcacggctacgaatgagtgagtacattgtagctcgtacgacttatcgaatactgcttaactatatctataaatcgcatttgagcacgaattggtgttcgagcatctccagcggcaagttcgtatttaagttttccagtagtggtcaatcagcaccaagtacaatgtgcacatgaatgactcactccacgacgaataacgttgcggaatacagggggcatattcacgcatctggagcgacgacaccctcccaaggccgctcacctgcgagatataggtagcgcaatgcaggtgggcggccttctcttaattacgcccgtaattttgaaataatccccaaaatgttgcttttgtaacattattattacggcaagctactagcccaggttttgcaaaacaggtattattcaggtctggcgacaggtattgtccagggataatttatcccgttttttattaccgtcatttcagcttttgcctcacagccaccaattcgagggggccagctccagccacgtggcattcgacgtgcggcggctgctcggccctggagaccccagcatcatggcgcgcacccccaagacggcccatatcaaggcgcagatggccgagcgggcgcggcaggaggaggaggcacgcaggaaggtgaccagcgcgcgcaccagatcgcagcgatcacaggcgcttcaggatgcccgcgactcacgggccacgcagttcggccctcatgccactgcagaaggcgactcatccactggcgatgaagaggagaaagcggctgaagaggaagaagatgtcgcagaagaagaggaagaagacgccgaagatgcagacgaagaggaagacggagatgaagaggttgaagaagatgaagaagagggcgcccaggagaagaaaaagaagaaaggagctaccaagggcgggcagcgccaagggaagaagcgcaccgtttccgacgttgaagacgaggacctggtgcacgttctagcgttcaaggcccagcatgactcgtggcccctgcttgatgtcagcctacaggagtacatggatgcgacgcgacagaagatcgtcatcgcggaggtcatcaacgtggctcgccgcaacgcagacttgcgtaagcaggtccgcttccgagggcttcctgacacagaaattcctctcgtgcccgacgagtgggagccctatcagcggaagtacatctacacacacggctggaaggagcgtgagagatcgacggggaagaggacgtcgcacaagctccgccgcactgagtgtccgttccagatgcttgcacaagtcgtccttcgccgagatggaaagttgggcatcgtcatgaagcgagaagtctacagccacaaccaccccatttccgacgacatctacaggtcttacccaggtattcgccaggttcctgccgagtctccgctcatgcccggaatcgatctcctggtcgacgcccaagccagcacttccagcgtgtacaagtacatcagggagaactcgaaccaccgcgtctcgatggacgacgtgcgaagcatgatcaggcgaatgaagacgcaaggcaagtggttatgctgctggtctatattatatgtgtgctgatgcttatactacttatgactgcaggcgtggaactgtccgatgacgacgcggttgcggagatgatcctgaacttcaatggagagtcgcccgctaatgtagcttccgttcacgaaagccaacgaggagatactggtgttatctcgtttaccagtggacacatgcgcgcgatggtagacaactttcccgaggttctgcagatggactgcacgcatcagacaaatcagtgagtcccccgactttgttatgcatatcatccaggtttacaccaggtattaaccatgttttcatatcaattgtggatagatacaactaccagcttttcacgattgtagctatggatcaatatggccaagggcaaccggtgcagtactccctcattgaaacgaatggcgattggcacatgtcaaagtgtctcgaccacttcaagcgtgcaaatgagcactggcggttcgtgcggatagtcatcgtcgacaaggacatgcgcgagatcgatgtgattcgcaagaaatttccggaggcgcggattcttctctgccactttcatgtcatcaagtggcttcatgaaaccatcaagaaatcgcagacctatggagcctacgaagcagaagttttgacgcagatgaagcacaccatcacgaacatgacatactccagaactgaggaagactatgtgcggcatcgggatgagttcaagagtctggcctcgcggaatggtcgtgtggagctatgggagtatttcgacaagaactggaatgcgtgccgagagatgtgggtgatggcttaccgtgtcgatttgccacacttcggcaatcacacgaataaacgtgtcgagagcctattcggtaagctgaagcgaaagctgaaagaccatctaactatgcgcgctagtctggaggtgcttctggaatatcagcgccgcaaagaagaagcctatcggtccaaggtcggtatgccgggtaccctgagagacgcctcgtaccctgaggagttgaacgtcgctctgggcatgaccacgaggtgggtagcatttgctctgaagacacaatttgacattgctacgaaccccggggttgtcgatacctacgctttcaaggacaatggcgctactatcaccgtacaaagcgaggagaacgagtatctcctcgagaaggaaggctgggtgtgcgactgcgagttttcgcagactatgaagcttccgtgcagacatgcaatcgtctacagaaaagtgtgtggaagccccttcatcatcccattctcatccatttcgcccaggtatgtccagtttttctatgagtattgaccaggtgttatccaggtatctcgttttacccatgtattgaccaagttttaaccatgttttgttattgatgtgcatgaataggtggtttggacagaatcgcatctcgcaacaggacttgatggaggtggaaaatccgttcgttgctaagctctacaaagggcatccagctgcgagcgctggcagtttgagtgaagtcgagaagtatcggcgttcgcagcaggcgtttggtcgaatcagcagcgagcttgtccgatgcgatgacactgtgttcgagtctgcgatgaagcagattgataagtggtggtacgacttacgtcaagggaagtttccgctggtgcaagctgatgcagacttcgtcgacgatttgggccccgatcgggttggcgctagtggtggcgggggcaacagtattagcagtgatagccacggagtcggtggaggtagcccaggaacggggggtacgaatgctcgtcctagtgcttctggtggagaggatgcagctcacgaaaaaggaccagatgatgacgaagacgaacccccgacacaagtgacagcctccgcccaggaatcggtgcagccaggcaaaggctcaaaggttcgactgacaaacaagaggcgtgtcggtcgaccacggttgaatcgtgctcagatgagggagaaggcagcattggcgctgaaagaatacaacaatggaatgaaactcagagctctactacgagataaggacgtgacggaagtggcagcaacgctggaattgattaagccaggtgtccgcgagctcagctcgtttttgacttcgcatgaaacaaagaagaaaggtgacggaaaatcaatccagtggatgtcggacacggaatatatttgcgaggttgtgcgcttccgactaccggagtccgtcgttgaagacgctctagctaaactgagaggtggtttggcaaaaggggaggagattgagctggacagtgatggaggggtgacacgcgaaacggaaggttacgtggccgccattgagaaagttggcagatttacccgggtgcagttagaagcgatgcagtcgctgtggaattggcaggctacatgccggaatgcggtactgtgttgcacatggctaagccaagacgtgaaaggtatcgtagtggaccccccccccctgggctgttacttggcaaagtactcgagtgttggccatacacaccgctacatggctttggcttcgacctgacctacgcagaccttttctgcttcagagactccgcttggctgaacgacaacgccttgcgggcttttaccgtgtttctgtctacttacaagaacaacgtgacggtgatggttcctcctcttaagaagggtaagatggggaagcacatactcgcaccaacgtcgctggacgaggttgctagtggtattgaggcgcatgcttttgtatttatgccggtcaattttggtggagttcattggggatgcatcgtagtggaccgtgaagcgcggctagtgaagacgtatgacagcatgggtgggaagagaaacaagaaacggcttaagaagatggcaagcgagctccttgcaggcccccttgaggatgaagcttacagcgacatcgaagtgacggagccgaagcagacagatagcgatagctgtggggtgtttgcgtgccgtctattgtggacgtgcgttgacagcgaagtgccaagtgatgtgtctcccagtggcgtcaccaagctgcgttgggcaatgctgcacaagatcaccacgatgaagcgtagctagacagtgagcagcagcgagaagtgcatcttatggataatacatggacaacttttgtttgcaacctgtaagaaacctgtacgagtagatgggtacacaatgattgttttgaagccattatcatgtcgtgtggttccgatcgataccaatcgacgccacttcgacttttttccgagtagtgcacacatgagttttccaggttttcacacctgcaaactacctggacactgaaacaagaaatgaatggctagaatgcatccgacacagcctgtaggccgtcattttcacttttcctcaagtactacgcacatgagttttccaggtttttaacctggacattaactgttctggtaatttaaccatccttgtttaaattactttcatctgataacgctcataattcatatacctggatataacctggggcatcacctggacaatacctgcagaatcagaaatctgagtatttttctaacctgggaaacctgggcgcgtaggctgtccttattattatccagtagccgtatatattacaacgaatagccaaaaagtaacataccaatatattggagaatgattactgagagccatcagtataaaactggttagtaagtatccactcaaaaatggcttgcataaagtatgggtttaaagcagctttaagtaggtagcacccaatataaaaccttgcatttaagtaaacactcagagcaacttgaataaagtattggccagaagaagtttcattcacttaaacctagtttcattcagctcctctatagttccgaatccataatttgctaatatttccactaaaagctactgctacccattacattacattcagcgcgggggggggggggggagcggtggggggggcaccaggacaagctccagctcatcgtgccggatacggtcttggaccagcgaagtgctcggcacgctcgagctgggcttgtaaacggtgtattttttcctccacctggtaaatcagggcccggacaccgtcaatgcgtacggagacgacgaccgcagctatcccacgcggctgtgaagctataacttgacgctcaggtattgggagtatgcgcgagcttttacttaactgtaaaagatctcgcttcccctcattacatgcacctaaacttactgttgctccacattactgcgagcatatacaaagagcctactgttgtaagcaggtatattagcaggttcgcacaacgtacaagttcaccacactgttgcactcgatatcatacgagcgcgcgctgcactatacatacaacggcaggttctaacttgccgctcaggcctttctcagtattgggagtctgcgtgagcttttacttaattgttggcagcaacgtcaaaagaatcgcttcacctcattacatgcgcctaaactcgcggttgctttatcttactacaaagagcatgctcgttctctgcgatgcctcaggtaaacaggttcagtgtacagcgtacaagttcaccaccacagcattgcagtcgatatcacccaggagcgtaaagcttccacaagatgcatagtaatatagttttactgggataggaagcaacgttagtgctgctatcgcagaccaaataggattatatccgtggtacatcaagtcaaacgatgaaccctcttgacatctacattttcttgaaaccggtacgactccggtggcgcactgggccctccaaaaggtttatatgcgtgggcagatcgcaccggtaggatacttatcacactggtatgacccggtaccgcgggcagatcgaaccggtgcgctaccgacaacactggtatgaagcagtataggaacaaaatgaactgaagagaccaattgaagcagagtgtacaatagcactcgtttgtattttttacaagctccacatagatctcaaccaaatctcgaatttttaagtttgtaaaatgttgccggttgacagtttgaactggcaaattctcgagcagatgctgcggctgcgaagcaagcgcaggagatgaccgtggctaataagaaaagaaattaaaaaattaaaaagaggtaaattctcctatcccagccttcgcggagccctagtgctaaattgtccttgaagatattatcccaaagcactactcctacatgcaataaagtagtgacagctaagacagaaacgtacgtaatgtttgacattgtactctttcattctcagtattttttattgcttgcgtctagttcacgatgttaccatatttatattcgtgcactggtagtatacttgctcctccttcttctactactactactactaataataataataataataataataataataataataataataataataatacagtacataagattgctaatttttctcatattcaactagactcgtaacaggcgcagtcgtactattagtgcggtagactttgtgcgatgttacaacaagcaaacttcgcgcgcacatgagttaaggctgtcaacgcagtaaattatacgttctaaagtactttcacgcaacattaagaccatacataagcggaggaggcgacgacacaggcaacattcatgtaatttatgaagtttctagggcattaactatggaaagtaccactgtaccacataagccactttttgtaattagtgcttaatggactgtctcgttttgctagctaccacaatataactagactaagttgttgcgctagtttttggctggggatccaaatcccactagatggggtgaatactggtaatagctcatagcaatactactactacagctactactatcactactataactactatataaatccaagcaagcagtgacaaagtagcatttgcacaaagccgacttttagatctacgctcgcaagttcaaacagtagaacttactatgaaaatgagttaggatgaacgcgttacgagcgctaattaacaaagtgctaagctatctcgggccccttacgtgtactaaaatatttgataaaagaatagttgtggcgacattggtaactacagttttcaaatcttgcaaaatactggatcattttctactacaacactaaaacgtgtacaaaatatcaaaggctctccagcgaagcacatagatagtgatagtacgcgtggtcgtatttgcgtgatacaatggtaacttgcagttacagagaagcatgcgtgcgaaccgcgccttagtttaaaacaatgttgtctaaaacattaacaattctacctatttagaacttaattaaacttttttcatttttgtctaaaagttgtgtattacataactaagtattcaatactatttatttataaatcagtgatatattaaaccaaatattgtgctttgcagtaattttgccgaccattttagacgctaaatatggcaaagcctgctcctaaatatgtgtgaacgaagacctgctaaaattatgcataaatccacctcctcatatatatatattgacttgggagggcctgtcagcagccatgcattggcccagtacaccactgtccatgatccccagcacaaccaccctcttatgtataattgccgtgtgtgtaggtgcttgtggataaaaacctacagaattgcagctgcacagccacaattgcactttcaaaagtgcaattgtggcgcttttagcgtaattctaggcctccacccatttatgcacctcgatttatcgtaaatctagcaggtggtcgctataaatacagcaaatctcgcctcatattgccaaaatcattgcaaagcacaataaaagctaatgtttaatataatatgttgcatttgtagcaatattaataatcttaataatgtcatagtgagatgcaatattatgtgatggtaataatataaaaagaatcgcaacctttgtaaattgaaatttgtgtcttctcaacgtaatcgttttgtaacttatatatcttgtattttatttatagtttaaaaaaagtgtcaaggtatggtatataatataaggtgtgtaatagcatgctgagttttgcgttgcgtgacagctattagtcacatcaagtgtattgtttatgcaacacgtcacagctattagctatgttttgaatctaacgtttgctcacggatccgtttcgggattattttaaaatttcggccgtactttgtcttttcctgtttattttaagctacagtgttcacggtaattagtctgactgagactatttaatgtaagtaggttttggacttgcttacattaaatagttttactaagactatatattgactaagactatttatgaagcacgtaaatagtctcacctctcatgtatcttgccgtgtatctactggaatttaagtcacatactcataagtattcgcctttaaaatgtaaacggtgttttgtcagacgagaatagagctgggcaacagtctacgtgccatttatcccaagggacgacccgcatcgcagcttcctgagcgcaggtcatgtcgctctacatgtaatctttctgggaattagcagcgattacgcaagtggaagatttttgccaggcttttgtagtttccccgaccacggccattcttgccaactttgattttacaaacagtccttggtcaggcttgctattcatgcgtatttatcttcgaaatgacgacgtaatttactagcttacacaaattaggaaaagttgcggaatgtgacgcaaaatgaagatttggtggtacaaggatttcttccaagtgcattcgatcatcgatagctggcagcccaccgaacgctatgcaaggcagtgacgcatcaattgcgtcggtatagcatttagtaaacgtgctaaaggcggtgacgtcgccctctggtgatagttgtactgcctgcgtcgcttgagcgacactgcccgatctgcataaagcattcgccgacagcatgggtgccttgctcaccgctggaggtaataatctcggccctgccctagcgaatctcggccctgccctagcgaatgcttctgaacctgaaaagtgtgctctcgacagaaatccttgtcattttgcgtcacattccgaaatttaccctacaaattacgacaatatgcattgactgagttgagtacaatgtggtgtggtaataccactaaaattcccttctaccaaaaggtattagagacaccaacaacacgctgacccgcaaaggtaagcgcttattggatcaaaacctgaagaccaggaacgatcccttacaccgggtcggttgcaagcgcctctgtgcaccttaggttatcttcggtcaacccagaaacctgtaccactagccacgagctaaggctaggatactatgtagcgctttcgcgcaaccccactgcagtccctcagaaaggaagggtaccggcgtgttaggccttatacagggggaccaaggtaaaacctcggtaggtagactaatacactcagggacacaaatatataccgaacgatactctaataccgttcctgcctctctggccacgccaactcttggtgctgccaaggaaactctcggtcaatgcacgataagctccccgacaggcatccacacgcagccgagcgtgtccaggcactacaataagctagctacacttaccgaagtcggacttgacccttgttagctttgggggaagactgtctttttattactgagtttgtgaggctctgggagcctcgttctggtcatcctttgactagtccaatgtctctatacaaatatgaagtgtgaacgatcgcaacggggcgatcccggacacatcaaatgacgaccgcggccacactaataagtgcggtcgaagtacgcaactaaatgcatctgtacctaaaagtgggtaccacgaagcctcttgtattaggacccgacgaggctccggccactatctgtcacttcaacgataatcatgtcatccgccggtcaaaagccgtcgtcttcgtctctcgcttgaccgctcttgattgccctcgactgtggttgattctcgggacggcggggcaatcacgtcgaaaatcttcaatttccgataccacaacaaagaataacaactctagtacaggagaaaacatcacagcagcagtaaagggtaactcaaatcggggtatgaacatcggcaactttatccttaaccgcccgggcaggtaagactaattttgaacttgaagttgtcagactatttatgaattctaaaattgagctaccacaataaataggctgactcagactattaacgaactcaaactatttttgaactcagactaattaccgtgaacactgtaccggagcatttcatgccccaaaatggttgctggaacgcgaccatcgggtatagcggagttcagtcacttgtttaatcacgttgctagctaagagtcgtactagaattgtttgattagatcaaaaagtggcttcgaagccgttgtcaatgggattgtcaaacgaattcgccgtaattaacagtggccgacagcatcgaggacccaaaaatgacctcacccaaattatacatatttgaaatcagcgtgcaaaacctgaaaaaagtaagactcaattgcagctgtgcgatacgtagaacacataaaaacctcatagaaagaaattccaatataatactgagctcagtatgtaatcacgattaaccgtcgccactaatattattatcgtataggatttgacaccttataaaaatatgaggtgccaatccaatgcgctgattggctgaaaaacttgtatggtttaggtcaattctttttaggacgattttgatccgtccttttctcgttgttttatgctgtgtttagcatagatgcagtttaccgaggtgaagcgactggtcctatttttatcaaaattgaccaaatattgatgaagttacgaagttatgggtcctcggtgctgtcgaccactgtaaacacttgagcggataacctcaatgcagacgtggtgtggcgtacacaaattgaccgggatgatgaccccaacgtctagtccactgtttaccttggcgctgcaacgtcaaccagcagcactcacaatgcccctacactgatggggcctggcaatatgtacggtactgtcatgcaatacaaggggaagtgaagtgagcggagaggggccactcagccgactgtattgagcatttgtgcacgtgtctgtgagccaaaaatgttatacacgagctgtggttttttgtcgtgcgctaatttatatgatcgcaccaacaacagttactaagcccgaaggctctgtggcattggaaagtgcgccagcccttgagtcgagttcaatcaagggtaatcaaggagcggtcaagcgagagacggagatggctggttttgattggctggtgaaattatactcggtagagtagcagatagtggccggggcctcgtcgggtcttaacacaaccctggtacccacttgtagggctgttcttaagttcccgctcccagcttccgcgagaaaattgagatatgtgattggcttagagcacccgactttaggactcgtgttctcccgctcccgcatttttttcgcgttgttgggagttgggaaattagccgtagcaccttcatttcttcacaaggagcaccaaatttgcatgacttcgttctgctatgtctgccctatctaaatatgtattctttttcgttctattacgtcgtcgttgtggagaacgagaagttttaaaatgtcatctcacggacgagtttggtcgaaaagggagcggcaacttaagaacggcccttaggtacagatgcatttagttgcatcccacttggcgacttggcctagaatttgactgcagtcgtcagcgcttggtcatcagtaagtgcacagctctccaccgctatagaagcgttaactcctcagaacattcggacaattgtgcactgcatatatctactttatggcacaattgtcccccaccctcccctgcgggaaataacgacattttgctcgaagagtacactacgtgatcacttcccggtgaagccgaaggggtgtccacgatgattcgccaaggaacagtgtgctggcatgttttgtataccgcttctgtagagacagtacattgacttcggcttttcttgtcggattggaaaacccttccaatgaatgctattgcagcttgttcagtagtgtgctggctgtgttaggaaatgctacccctttggatagtttcagaaaaaagcgtgtttcacaacattagattatttcacatagatttcactgtggttcgttccgtcaaatccaagctgaatacagatgatcaacgcagtggccggacagcaaggaatacggcggggaagtgtccctctcgtataagctggtcattttccgcataccttggcttaaaaaggccaaaaacaagcatattcgtcagcggcaatgcagctgtccagtttgcccttgatcgtcagaaacgctgcagcatcgaggtcggaacctcgccatacgtatccttcacgttgaccacgagctcgtacagtgtgcttgcgtcttgagctgctggcgagtctggatggcgttgaagatggagacgttgagaacgctcaggttggggctgttcgggggttataagcgtagctccacgttacagccgctcgcatacactgcatcctacagtgcaacgtcgtcaggtacataggtacattgtgagtatgtgtgtgtgtgggggggaggctccggacagcgtaatcttgatcaccggtagccccgctgcattgacatgtcgcggtgcgtgctttgttgactggctgcccctttggtatcagtgtgcctgccgatttgtagcgaccgctacgttgagctggtccatggttcaaagggaccacagaccaagcttgtcgtcgaaaaactcgcccgttcctgggacccaacgaggtctggcaactgcagccttcggaatgtgcctcttactactacggatgcgaccggtgagcgtgtgctcatcaggcaatcgcctcttcacggtggtcatgtagaacagttcatggataatatatcccatgtcgtcgaaaagcatggttgatgggtcaatgtgctgcgcacgaaactccatgcgctgaagcttgttgatgtcggtcaggagcggcttgacgatgctcgtaccgatgcggagatcgcgaatcttcggctctcggaagagcgtcgtcaaggagaggtcgcacgccgtcgccgtgcggtagtgtgttgcggcgctggggatacatagctggcagccgagcctgcagtccaccaggattggccttcttctgttgtgcttgcgaggcggatacgcgaacacactagtggtcttgaagtgctcagttgcgtggcgaagcggctccgcgacatttgcaggtcgcgggatttctcttgtacaccgctccctaactgccggctaatggaggaggtattctaatttccgtaaaattgctgcttctcaccttgggtacccgtcggtgggccaagttcacgaaccttttcaaaaaatcgacagctgtgaggtttgaactcacgcgggttaccccaatggatttcaagtccatcgccttaaccactcggccaagctgtcacacattgacgtatatatgattatatattttttaattatataccacttaatgcactcaagctacttaccaattgggccgggtactcaaataactgcttggcaaagccgcaagggctcgaaatagatactttggttattcatgatataactttttcctacgaagcagcgatttctgtcagggctgttgaagaaggctgattaccgcataattgtagttctaagcgtcgcttagttctaaaggtcactaactatttgaccaatgacactcgttgaaaacaacatatgatttttatagccagctcctatttttaagttatgggtctgctaaatcgccagttcggaagagacgcgaagcagttcacatgactcggtcctgcatcaatggaagaggtagaaagtgacgaacgtacgagcgagtcccggtcgattattcacacaagcgcaaggtaattaactacattgagaaaggtaacgacctcgatgggaccattgctttcttctatggagacgtggcagacaaacgactgcgcgccaaaaagaagcagataaacaagtggctgaagcaagcgggtcatatttgcgccgtgtgcaaaagcggccgtgcgagccatctcaacgtccgtgaactagttcaaggcaccgttcttccggccgcggctgaaaccgaactggttatgtgagtaaatacccttcggaaggacggtgcacctgtttctcggctcatgctagaactccaagcgaaggaaatcgcagcggactgcgcattaggtgacaaatttggggcttcggatacctggtgcaagttttttctacgtcggcacaaactgtcacttcggacgcgaacccgtcaaggccagactacgccagacgaagcgcaataagccctgcaagcattccgtgcactcgttcgcacaacgatcgttgaaaaccgctgtgtaaatgtgtataacgccgatcagacaggtaacaaaggttttgtatgaattgttttcgttatgcttactgacgatattgtagctgtttttttcgagttattgccgaagcagacaataacgactcgcggcgtcaagacagtctgggtgaaatgcgccagcaaggacaaaacaagagccactgcgatgctacttgccgactgggaaggaaataagacccctccttttttgttgtttaaaagcacacctgccaagacagatccgaaaaaggaagccaacaaaaatctgcgaaatggattcggtgtcaccgtgtggaaagaagttcgcgcgctgcgagaggagaatgagtgccagatatacggtaacaaggccgcgtggtggaaccatgaattgtccctgaagtttctggagtacaatttcgctggtcgagaaaacccagatgagaacgtccttctactctgggatgattttggtggccattggacggccgatagcctggagtatgcagcctctctgagcgtcatcttgctgaaagtgccaccgaagtacacatacgcctgccaaccggcagacgtatcctggaacaaaccgtttaaaacggctttgcgaaagcgttgggtcgacagacttcgagacgaactcgtcaaatatcgcgcagatgaaaagcgaagggagcaaaaacgagaagagctggggcaaaagatcatggtggctagaaaggagctcattcaggtggaggcggatgaagaagtagcccggctgagagaagagtataaagaggagccgtttaaactcacggctcccaaccgagtggacatcacacaaaggtttgtgtcgtgctggaatgacctgactacttaaacgatcatcggtggcttcgcccgagttggcatcttgaacgatactcgctcttgcaccgatgggcttaaaagtgatgaaatcgagaacggcattgtcgaggagttagagaaacgccgtctagccggtgatgaagtttgctcggacgacgacatttcagatggtagtagtagcgacagcgaagtacgagtaggtagtagctaaactcgatctgaaattcatgatattgcatctaaacccgatgatattgtatctaaaaccgaggatattacatccaaaaacgatgatatccaaaaacgtgataataacgatcagaagaattcatactaaaaacacggaataaaatttagtcttcggattactaaaattggattcgaacatgtgtgattattggaaggatgtgcaaccagtgcaggtcgggtgacccttaggactacgattatacggtagttggatgactgttttcattttagcgaaacagagtatttcaattgaacatggtcttacaaaacctgatggtacaatcacaatcacagcccaactgtcgtcgtattggagctctttacgttcagtatagcaatgcaggccgtcgtaaggcattatttgcatgattattacggattcatcctagcgagagtaataactcgatttaatgtgttttattgtgatcggcaccccgaatgtctaatcggatagtaaattgatcgaggtttttctggctaatttagacttcaaagtcttatttattttgtatttttgactgatctcctaattagattcgccacctctattttagactagaaataatcatagcgaatagcaagcaggaccatctgcttaacccgattcgcaacagatttgtttgtaagtaaggcggaatgtcaccgtggaagtcgacatcccgagctatttggtctaaataattatagctctgtaggtgccgatgtaagccatcagctttgtagcgtccaatatggaagatgccaaagcatttagagatagtgcactagactcggccgaagttttattgacatggacgactcaaaagtccgggttatattggcccaaaggcgtatcggtagctcttatccgccgacgctaaattagacagagtcgagtctcgccagcttatccaagcatgattacacgttcctatttgctaaccattttcgctttgtagctagttttatacccttatgtacgggtattcaaatccgattaatataaatatgttagctaaaaaggcgtggacattccagtcgcgtttcccaatttatgtgcggttatgtttgcccggcgcatgtgttaattaggaataatctggttgaaaactataagtccgtgtacgagttgaaatagcatagttcgagctgtttcgctacaaccaaccatttcgagtgatctgtttttacagctccaggcgaaatagcaacttcgtggataaaagctctaccatgaatttcaaaagtacatgtagcgatttcgagatacttgctaaaaatgaggcataaaacctcaaaatgcccaaaggagttattttgtgcactaaatgcgcatgatacagctattgtgggttctactcaaaatttccgaaccggccgactgcaatcgcccgagccaaatcgctccccaatcgccccggccacttggattgtctattggaactcgattaagtacgattaacatatggcattcttgtttggagcggtttcaatctgtacttggatttgtattggtcgattttcgaaatcggtccgatttggacattttcaacggaattgacaatattagtgtgccatcttgaccacggcctaaataaatactgaggtgcgctctgagcttatttttggttgcttgagtgagtgagttgagagtaaggagagttgggtgattctgttattgagaggtgacgtgagcgaaacagtgagggatattttgtttgagtaagtgagtatataagtaagtacgttattgagtgagaaaatgggtgggagtataagcggaaaacgacaggaggtgagagtgggtgggtgaatgggtaggcttgaaagagtgagtgaatgatgattgagtaacgtaaatgccagcccgctatcgcctctcatgattttgtggtcaccactagacctctaccaatccgggaatagtcaagtttccccgattttcagaatatttggactcatttgaagtgtaaaatatgggattcactgcccgccgagctattgtttgtcttctacgaatctagagtgccactgtttgcaatgcaggacaccttcaagggctacatctgtttagcgacgtccgccggtccgttttctcgcattcaataagtgagaagtcggactccaccgtggcgttgttggggaatacggtagctatacctccgccgaaaagcgccagtttcgtgaacctcgatgcagcttcttcaagctgccacatctcgtggaagctggctaggcggtgatcgaagccctcaatcgctgcgtgaatcgaattgttgctggtgctcgtgcatattttcatctacacctgtgcatttcacgtagaaaaagaacagcacgtctttttctacgtgaaatgcacaggtgtaggtgaaaatatgcacaaagaacgagtagtaattgcagagaatggtggattagactgattatttgattgctaacaggaaccgctctccccatcatgcgtatgagacagtgctacccctactatgccccgggtactctgatcagattagacaggatataatacatgattgtgcatagtggctcgaaatgcaagatgaatctcgtccgatataccagggtatgtaaaagaagaggtaagctggaaagaatgagcaccgtagacactatattttgctatgtaagggttatattgcgcatgtaagtacttatatgcacccctcagagagaatgcagcctggtgaggtggcccaatccaataaaaccgagcaggacgtgcgctttaataatgctaagacgccattagcccgcggttgggaagacgtgtcacttgattgctagctaggtacagcaggttttttgttttcaaggcatgcataacctggtatgttgggatgcaatcataggatacttccagcataaacccgcccttgtgtttgatttttgttcaccatcaataaaaagtacactgcaagttgtagtatatacaccctgttgaaatttagctacccatccgagggcgtcttagacaacatgtgcgtctgtctgtgtcattcagtttcccgcaggttatagaaatgtgtcgtacttacggaaggcaatagttagatcaaatacgcatacttttaacatgtagtatacagctttaacatggtgtatattgatcaaagccagggaccgaaaacccccgcgagtgcggggggggggggggttaaactcctggctaatcttgttatcatcttcctcgccaacgtatagaagaagccggtcgtggtggccttcaatcgttgctgcgagctccatcatcgtgctcgtaacaagttatttggacgtcaccagtggcacatacctattcgtttgcgtcagagtgtgaatttgagccagcaccaagacggtgttcgtttgcgctgcccccagtgatttcaggcttgtgcgaactcacaagtccagattggtcacgcaagttatcgcagcagcgtgcgaaattgcaaagctcccgttgatctcatagtatcacatacgaattaagcatgttgtataagctacaactgtaatatgttgattatagcttattgccgtttgcagatattttggccaacgcatgcttattatctcgttaataatctcgattttagtctagcaagctcttaattgagacctaggtctgatttatatatctcgccagtacaggtctaagatgcaaggttggggtctgttttacactttgctacgacttggaaacgcagaaatgccattctagacgggccaaaccgagtttctaggccttaaagcggcccccaccaaagcataaagctaaatcacccctcgcctatctcgtgtccactcatattaagagacaggcgtggtctattttagaggtctattttagagggcaaagtatttgcaagcggcaatatttgtcgggtatcataattgttctgattaaacaaaaatatgtaagtcgcttcatatgattagttgatgtaggtgcatattttatgcgagtgcagacgaattgcggtgcactagtggttcccaaatattgcacctttttcagtaatcgacatttctattttccgccaaaataaaaaatctagatttggcggtcttttcgaaattgttgtagtttttttaacaaggggctcgtgactgagctgaaggtttcctggtaggtccgtcctgacaaggattttgcgccaaaagatttaagaatgcactagtataactatcatcgagaacggcgtctaaaagaatgactagagcctttcgtacaccgactcactctttagttttcgtgctggacatccagatcgtggtacgtatgctactcgagctgctgttgctacgggcggcggtgctcccgtgccaacgtcacctccgacgtcggctatgatacccggggcgctggagtacgtgcatagctgtgtataacgtagacacaaaatgaagcgaagttagtgccaatgctcaatgaacagtgctcagggacagaagtgcatgtacaccgtgatgcattacaacaaaatgaccaacccaaactcaatgcaccataatccggcacaatgaggagactaaaataaggcatgcatggccaatgggagatggcgaaggtgctaaacgagatatgtctcgacttcaacgaggcaaatgctcgcaagctcaacgtgaataattttgtctagtgttgtttgtttttagtgagcaatttttgtagcatgatagttcatagcgcaaaaatagttagcaacctgacctacccgggtgacccgtaaaccttcagctgtattacgaaccccttgttgaagattaccaagcaccccaggggctgagcgagagtactgctcgcgggaatgagcacgaatagctgaaacctcgtgagcgcgcttgcggatctgtagctgcttacatcaaagatgggagaagcttttgcagctctacgctgtgatttgatttttttgtattgtgaaaaccgttcttttgcctattttggtcgtaaatcgatcgattagcaccctgatttagctggatcgatttgtaaatcgatcgcgtccctgcgatgcatatgtgagtgggtgtggagattacacgatcgattaatgtgaaaccagtagatatagacgcgtttggagcagaatgtccaccttttactgggtaatcgtgcagcctggcgatgcatatggatcaaaatcgatttataccctgatttgtactctgattaatttggcaattgagatctaataagaggttgctacagatgggcgttttagccggttattacaataagacttaaaatgagcgcctaactgtcagttagaccctttctttacgctggtgggggtatcatcagccattggcttagtcgttaggtttcttaaatgactggaatgtacctcaccgaaaaccaaactggtagggtatcatcggcatctgtaattactcttgcctaggatcacagtcattattttgttattgggcacccccgtcgagcgtaaagttgacacaaaatcgagccattttagcctatcagtttttccttaatagagctgctcgttggtgtcgtgattatacgagggagcaggagagccaagctcgcgatttgaagtgagctgagtgtttttcgctcgctcgcgcccctgctcgtgggatgcttgcgattctaactgtcttggaaatatgcaacacaaaatccaaagtacactaaaatattgataaacgtaacttatcaaactttggttttagtaaatgcacgcctgaaactaaccaaatcaacctccaggttcatagttcaaaccaaaccaaaattaccagcaaatcgagcgttttgagtaactttagaatagtctgcatgaatattcagatcaaaaagaatgaagtactgagttgattatgtcttgagtcgtattcgggactgcttggtattgtactagccaccaggattgatacaccagtttttcttgtggctatagctgaggatgtagggcagccacaagagtttctttacagcaaaagaagcgtcgttccatacggataatatattctctaccattaggctagctcatttggaattttgccatcatgaagccaatctccacccccgaaaagcagtgattctccgaacccaccgctattttcatgctgaggctcagcaagaactcgacgcgccgtacactgcgcgttcacaagtgtcttgtctttggtatgaccaccatcgcgtgcgtcctcgcagccgagaacaagctcaaacgcggggacacgacagcgccgcccgctgagccaccagctcgtctgagggagaccgtcgaaaaatacagtaatttaatcaagcaaatccttaccgaccgaaatatttccggcaagaccgccacggcgcagcacgtcgccgacaaggtacaaggactgacaggtgatggcgtctcagcacgcactgttcggcgtgcgctacggacaatggactgctcgttcaaggttggcgagcggcgcgacatcggcgccgacaacgtggccaacgtgatctaccggcgtatccacctggagcgcaagcgcaccaacctcaacaagcgcaccagcctcaacaagcgcaccaacctcaacaagcgcactgccatccgaactgaagtcttcctagacgagtcttactgcaatctccaccacgtcgcccagcggacgtggcttctacccaagatttgccgctcactcccatccgggaaagggcggcgcttctgcattaccggcgccggcgccatcacgcaagtcggtaagcttcgcacacgcggtgagtgggtcaaaggatccgtcaaagtgtggaccgctgataaagctgccattacgtccgcgggtgactaccacggcgactttaccagtgaaaagtttgagcggtggttttggcagttgtgtgagacgctgcccgacgagtacggcgagtgtgacatcatgatggcattatgatggacggcgccaagtatcacaagcgtgacgccgaccccccccccccccctcaagggcccacgttaagtggcttctccgccagagggggggggggggtcgtgggggagaagagcggccagacatgcgacgagacggtggagattgctgcaaaatggggctaccaggtgctctttacacccccgtaccatcccgagttgcagcccattgaacaaatcttggctgcaatcaagaaaccgatcgccagaagcctgtgcagcacaatggccgagctggagccgaagatctaccaaggcatcaacggcatcacaccgaaaacctgggtgaagatgtaccgccacattcagaacgtggaggaggagtacctggtggcggcggagccggagaatgagtccaacttcaagattggcgcagagggcgcgaacgagtaaaatcagattccaaagtatcgatgcttcatgaatattggatataacatgttgcaatctatcggtccgtggtcaccgagccctatttagatctgagaaaaatatcggaggagcaaaatcattcgtccaaattgacgagtccctgttgttttctcggctttttgtttgcttcaacagcccttaacggtcgaggattgattcagttggagcagggatcgtgctgattccaacggtattttttagtactgtataacgccaaataaagactcatggacggctggcagaacctgtgtgttaatccaagtgaccagtgctacaatacacatcgtgctttcaatataacgttcaagacgtttagtgcgactagccttactgtttacactgtttacaccagggtgggtggtatcctggccgagaagcagcgcgagcgctcggtgcacttgctggtcgccaatacccgcgattaggcgggggcgtgtctgcgcgagcgagtgaaatacgagaaagagacaaagaaaaacgaattgtgtattagctccagagcaatgattttcgtatgtgcgacccaacgctggcgttattgcccggcaccagccatgtcagcctgtcgggggcgactcatccacaggttcactcaggcctgttagggatgcggctttttgcgaaagataatctgtttgaccaaccaaaaggcccgaagttcgaaccaactgaagtggccacggcgtaaccaaaccaatctgcagtcggttcagaatttgcgtaatcccagtaataaaaagatgaaaaaactttacaagaaacaggtaactaataaccgacgaaaatatggttcaaaaaggtcgcggagttttcattgagccttatttatttatggttaacttatccaaaataggaaggggggagggggcatacttcctaattcaaagcaataaattcattagtggattttaagagtccttgtagcctgagcgaagccaaggtatatagtgatgttaggaagtcgctgcaggactgtcatgctcctacttttaaagtaatgcttaaaagcaaatagcgaacaatttgtacgctactgatgcagcacatcctcgattgtgcggggtttaggatatcaggaaaatgtacttgaagagagtccgacactgctcgattttagggaggtgcgcataacacaaagtgcgcaattttcattttactgacaaatattacaccgtcctttatttcatattttacgttaataactattagccctgcaattagagtatggtaaaacggcacacaatatataaatagagtaataaaatgaatttgagtgcgtcacggaattcccaaaatattgactgcataacagatatacagactagagcgtgagaacgagacgcctgatatattcggatttacaagggaataatatgtggcagacaccactttatgtgctttacattgactgtaataattgattcaaacggaataggcgggtattatgtattaaccgtcttgttctcacgctctagtctgtagtcacacctgaagcaaaccaaaccaaccaaagtgagttgtctaactccgttttgcacttccagttgcaacgttacttgctagtaacgttagttaaatagcactgtagtgggcctactttggctcactactttcgcttacacgtgtgcgcgtgtatgtgaggaaacgtagcttagtttaaattagagttaattatactcgggcctccgagtgtagattaatctaaataaacgatcaaaataatgtttttgggttaaaatgagaactgctatttttgttttatgtttctgacttcctctaaatgtaatattctaagataggaatctgccaacagctggttggcagaattccaatgctatgcatgtcgctcattggctaagagatgctgctctcagccaataggaatcctaagtctctatggaccacccgtcgtggtggtcgtaaatgtatgtagcctttggtgtgtctacaccaaggtcgagaaagtctttcgaacctctaacagacgtcgtgtctgttagagttacaagtgactgtagccacttgtgcgtgtaaccccgttacaccatccccccctcaaggttagacgcgccgagtcacggcacgtcaatcaggaaattgaccattcgtcaattcttcacgttgggagaaagaaaactcgagctcattccgcaatgagctcgccgcagaagaagaccgccgccgcaacagagggtaacctctctgttgctcagtaccatgagcgccagcaggcaaagcgcgacgcgctcgctgcaaaggccgcgtcggggacaacccagtcggagattgtcctcaaaggttcctctgtagtcaacgacgccgttgactacgggagtgacgacgtagagatggaagatggcgaggcctcttccaacaagcgcaaggagtctatcgacagtgatagtctcgacccgcatgcggggtcgagacgccctcgtgaaggagacgattcggacgcttcaagctcgaagcggtcgcgcggcgagagcgaaactccgctctccgctgctggggctttaagctccccgcgtgaggtggcgtcttcaatttctccgcgcgctgctcaggcagcgcgcgatccgtggatgccgtctgcgtcagagatcgcagaccgtgtgggcaacactgtgcctccaaatgaaattccgctgtacgtatgcagcgggatccacgatgatgctgtggcggaggagcagcactttgatccgttaacgaatcaaaggcgcgattactatatcggactctttcacgagctccgatacttctccagcaagaagacctcttctcgcagcaaagtgcctgagtggcaggcactttgtcaaagttggaatgcttttgttgagaacttcaacaagaagctggctgcttactgtgagcgggttaagcacgcccgtgaacgcttcgagacattctcgacgcgcgggaggttggagcagctccacagatcttctgtggacgctggtatttcatgcgctgtgcccgaaggccaacagtgcacgttgtgtcttccgggtgcggcgcgcttgagcgaccgcgacctaaacgggtacacgacaattcgtgtacctgcgagtctcaaggatctccgtgccaagttcttggcacgtgaggaacgcgacgatcgtgggacctcgggcgctgtaggtgaccacagcgctcgcactaccttcgcgtcggcagtgcgtggtgagcttcgtacgccctcaccatttccggaacgtcctgcagcaggacgtcccgtggctcccatgtatcttggtggggcggaaaccctctccaacgaatacgataacgaaccggctgccggttcgttttcgggatactatggttcacaatacgctcaacaatccagcgtgttgagccgcgggcatcgcggatcggaggcggcggtggtgggaacacgccccgggtatggtcaacctggggttgaccttggcccgacgctcgaggagcgggtcgctactgtggagcagcttcagagccgtgagttcgccgctctgaagcaggagatggcgaccctgagagctcaagttgctcaggcctcgcagaccgcgtcggacatctctgtcgacgtgggaggtcgcgtcgtgcgcttggcccagcgcgttcacgcgctggagcagaggttcgctcccgctggggcttccgcttcgggccagccgagctaggcggctcgtgctgccggtatggcttcagccgcccgacgtaaaaggtcggatggaggcgcatgctagatggaatatctagcgtgtaggcgttgccatgccgtgccaacaccgtgaacggcccgatgaagcgcggagcgagcttgctcgccccgaagtcggaaactgcatgtttaggcaggttttgagttgctaacaaaaccaatgaacccttcttgaattcattagtgttgcccctgccaacgttgtctgcgttcagcttctgtcggtcgacagaagctgcaatagcgtcttggacaaaccgaatgacggcttgtctgcgctgcacgaagttgattgcgtccgagctgaactcgttcagctcgtttctagcagtaggcccggcctctgcgttcgtcttcgcggtgtctgtgccctgcacagacccgttctccttcttcttcttgctcttgtcggcgtctgtgccctgcacagacgcgtgcttcttcttcttgttgcgcgtagtcgcggctgacactgtgcaagtgtcagcggcattctgcggctgctgcgttgcagtcgtagatcctcctccacttaaggaaggagccaccatcccgagtagactcgggaggcgtgggtgcctgatggcattcacgtagaacggtgtatgcccggtcgaggcatgcaccgagtcgttgatggtgaactccgccatcggcaggcactcgctccagtgttggaacgagtgagcgtacgtctacgagcacgcggttcacgcgctcggtctgcccgtccgtctgaggatggtccgcagtcgacatcgaaagttgactcccaagaagtgtaaacacttcttgtcaaaggtgtgcagtgaagcgcgggtcccgatccgacacaatgtcgatcggcatgccatggtggctgaacaccatgtcaacgaacagacgcaccgtctgcttcgcagtcacttcagcgggtactgcagcaagatgtaccatcttgctgaagcggtcaacaaagaccacaacgcccgtgttcccctggctgtccgggggatgaccgaacacgaagtccaaagacatggactgccagcactcccgtggagttggtagtgactgcaagggagcctgcgcgaaaggcgcaggcttcacacgttgacaaacctcgcaagcatggacgttcttacgcacccatttatactggtgggcccagtagaagtctcgcgtgagaagaaggtatgtcttctcacggcccggatgccccgcagtcggtgcatcgtgatactcatacatgatcctgagtcgcaggtcatgatcattgggcacgacaacgcggtccgcgttgtcgtcgactgcactgtagagtaataacccgtcgtgcacccgataacggtgtgcacgagcacgaagatgcttcggcagcttctgacgagcttggtcagaaggcgctgagccgtaggccagcaagagcttcgcgtccgcgtcgtgcgcgtacgcgaccttcacgtcgtccaacagtgacgacgttcgggtgctcgatcgcatggcgtcaatggcattgacgtcggcatcagtcgtggcgtagtcaggtcgacgcgagagcgcgtcggccaccacattgagtcttccgggtttgtactcaacccggaagttatactctgcgaagaatgagagccatctcgccatccgttgcgagatgtgcggcgacttcacagccgtccgcaacgacgcgtggtctgtatagacgacgaacggtttgcttccgagtagatacactcggaacttcgcgagtgcgtacttcatggaaaggagctccttgtcatgtaccgggtagttgcgctcagctggcttcagctgacgcgattggtagtagacgacacgatcacgaccctcgtgatcgtgctgcatcaacgcacatccgattgcgaagtcggatgcgtcacacacaacgtggaacgggcgatcttggtcggccaccgccaagatcggcgcctcagtcaagccccgcttgactgcatcgaaggcctgctgacactcagcaagtccaaacccactcggcgtccttcttcaggagctgtgacagcgggcgtaacatgcccgcgtagtccttcacgtacttgcacaagtacgtggccaagccaaggaactgccgcagttccttgacgttcgacggcgtcggtcactcattgatcactctgaccttctcagggtcagggcggacaccgttcttcccaacgagacagtatctcgctcgccccgaagatgcacttcttcaggttcgcatagagcttgtgcttgcgcatgagcgcaagcagcttccggagatgcaccttgtgcatctcaacatcgctcatcccgtccgcagcccagctgtggacgaacacatcgtcgaagtagctcggtgcgaagtcgcgcaccgagagcaacaagtgcgtcacgcacctgttgaaggtcgcaggggcgttcttcagaccctgaggcatcactagctactcccagagcatgccgcttggcgtgctcacagccgtgagagggatatcgctctcacgcatgaggatctgatagaacccatcgcgcagatcaagagcactgtagatagtgctcctgatctgcgcgatgggttctatcagatcctcatgcgtgagagcgatatccctctcacggctgtgagcacgccaagcggcatgctctgggagtagctagtgatgcctcagggtccaggagctgtgacagcgggcgtaacatgcccgcgtagtccttcacgtacttgcacaagtacgtggccaagccaaggaactgccgcagttccttgacgttcgacggcgtcggtcactcattgatcactctgaccttctcagggtcagggcggacaccgttcttcccaacgagacagtatctcgctcgccccgaagatgcacttcttcaggttcgcatagagcttgtgcttgcgcatgagcgcaagcagcttccggagatgcaccttgtgcatctcaacatcgctcatcccgtccgcagcccagctgtggacgaacacatcgtcgaagtagctcggtgcgaagtcgcgcaccgagagcaacaagtgcgtcacgcacctgttgaaggtcgcaggggcgttcttcagaccctgaggcatcactagctactcccagagcatgccgcttggcgtgctcacagccgtgagagggatatcgctctcacgcatgaggatctgatagaacccatcgcgcagatcaggagcactatcggcgtctgcgccggtatcgtcgcatcgttcagcttgttgtacgcatgaacgatgcgccagccgccctgtggcttcttgacacagaacgtcggagcactgtgcggggatttcgattcccgcacttgtccagctttgcgacgactctcaaagaagtcgtcgatcgccttgacctgctctcgcggcagtggccactgcagtgtgacacagtacttcgtgcccggtacgagatcaatctcgtgctggattcccttgtcctgcggaagctccgcagggatctcttctggaagtacgtccggatctcttctggaagtacgtccgcgtactcccgtaagacctcgtagtagggactcgtcttcaacgagtcccagctctgctctttaaagcgctccttcttagtcttcgcactgagggtgtcctcactctcagtggtggtctccatgaggaactgcctcagttcttcattctcgctcttcgttctctcggcgtccgagagaatgcatatttactcgatgcgtccattgtgcaagtcacgcgcgaagcgcttccagctcatgactggaagcgaagtcaactccgacgcttgcgtcggaggattagcgagagtcatctccctgtaccggaacccggcacaggtacgcgtcaagacgttcaacgtctcgacgtccagcttctcagcctccgtctgcccggtagacatttcttgtagcgtctcggccccaggccgagacttgcccagtgaccttcgcatgcgccgtcttcttgttttgcggagcccggctccgcttgggtcttgacctcgtccaggcccagccgtggacgggtgttcttcttcagtaccgccggcgggtttatcccgcgggcgagcgacttcaagcccggctgcacgacagcatgcaagtttttccggtgcgagacgtttgcaaccgtccgcaccgcctgcagcgtcggctcccggagccgacacgccatcttcacctccacgcctgttattggcggagtcctttgttacaaagggtgcgtcgactccgggagtcgacgcgaaacttcttttcgcagcgccggttcccggaaccgtcgcgactttagtacctcgacgccaaccattggcggagacccccattacggagggtgcgtcggctcccggagccgacgaatcaaattcacccaagccatcgactcccggagtcgacggcgttacgtcaccttggctcttattattggccagacctgaaccaatcagattcgcgtcagcctccacggctgaggcgtgtgactcgcctgcgtcatccgtgccccttgaggccggagactcttcctgattcgctgaaaagcgggtgtcgacctccgaggtcaacacatttccgtcattagctgtcggcggtaacgccgacgctaggtgctcttgcgcgcgtgctcgcgcgcgcccagggtgctccgggacagcggcaataggcgctgtctcgagtggggagtcgcgcgcacctgtcggtgcgtgcgtagcggcaacaggtccatcgctcactgttccactgtcgcgaccgaagcacacgagagtgcgcttctcccaatcgatgaccggatcatgacgtgcaagctacggcatacccaatacaatgtcaaacttatcgtccagatacaggacgataaaggtctcgacaaattcttgatcttcatacgtgaagcgcacgcgtaccatgcgtttctcggtcttcacgacggcacccgttgccagtcgtacttccaatatacttcgaggtatctttaaatcctcgaagtcaagccttgatagacttcgcagtcttcgacgcgccagaatctaccaaagcacggagagagccgcttgctctcatcgagttcacgttcaggatgacaaggtcaggtttgtcatcttggttcttgcagtgagaatgaatctcactggggggctgcagtcctcagtgtcgcgtgtccaaggtcgacacgcggaactgcattaccagtaggacgccccgcgcctactggcgtccagcgtttttttgtttggctgcgacggtgctcggcaccgccgcgatagccaccctgctggtgcacgggggccgtgcactcccgagcaaagtgaccgactctaccgcaacggtagcatcgcacattgtttccctgcgactgctggggtccagcagttgcagcactcgagaggtccatgggttctgggccttccgtcctcactaccgggcgtggctgtggcctcggcacatgtgcatgcagcttagcctgccgcaggctaaactcctcctgcattgcaagagtaattgcagcttcgaaagtactcgggtactcacggaagagataggtcttcacaggctcatctctcagtcccttcatgaacgtgacgaccttggtcgcctcatcgatcggattggtcacgatgctcgagaccaagtaccgtgctctctgagcgtaaacatggacatcatgcttgccctgctgcaggccgaggaactccgccctcgaccggaactcgttttgtggtggctcaaacgctcgtctgagctcatcctcgaaactctcgtacgtgctaaagcacgtaggatccgagagtcggcgttcatacgcccaacttcttgcgtgccgccaagacatgacatggcgaacgcaaccttcgacaacgggtcgacgatacgtcgagccgcgatggctgtgtcgagctcgacaagccaacggaagagaggttcaccctctcttccgacatagttgctcacattgagcttcagcgattgcgcgcgtggtgtcgtcccggacgacaccgcggtagtagcagcaacatcgcattgctccttcaggatgaaacccagagcaacaccgtgttgctctgtcggcgttagcgtacgcagcatcgtagctacagccgcctcaccaatgactgttgacagttgtttgagggcctcccactctggatccgacaggtggggacagtcagcgcgtgcaacgtgagttgcaggcgtagtggagctttccatgggcacctctgtatccatgggaaggttctcagctccgcgttcgtgcggtgacgtacgaactcaggtagtcggtcgttggacggactacaaagtgctaccaggtgtagtgggcctactttggctcactactttcgcttacacgtgtccgcacgtgtatgaggaagcgtagcttagcttaaattagagttaattatactcgggcctccgagtatagattaatctaaataaacgatccaaataatgtttttgggttaaaatgagaactgctattttgtttttatgtttctgacttcctctaaatgtaatattctaaactgggaatctgccaacggctggttggcagaattccaatgctatgcatgtcgctcattagctaagagatgctgctctcagccaataggaatcctaagtctctatggaccacccgtcgtatggtcgtaaatgtatgtagcatttggtgtgtctacaccaaggtcgagaaagtctttcgaacctctaacagacgtcgtgtctgttagagttacaagtgactgtagccacttgtgcgtgtaaccctgttacagtaactgcatctttgaagtgtccaaaccaacactccaggcggttgttggtgtggactttgaagtgaagtaacgtgactcgatggtgtaggacccacatttcttggcaagtatgccaatttgtctccatgtagttgaagaatccatcgaagcctgtgcgtccacacagcaactgcaaagaggaccgattgatggaatagtcatcagcgctctgtgcgtagatcatgttatgcacaagagcatccaccgcttcatgatcttctggcgacaatgtaccgtactctggttttgtggagaagcgcgagaataagatttgttctctgagaaaggcggcataaccgatcgaccaaaactcaaggggatcgacgatcgagagaaaggcgacgtgaataagactgggattgcggagatcgagaaggttcgacgagcgatcgaggcaccgggatggtactcgcacgtaggcggggtgtggaaccaggtagattcagctgatcgacacatggagagtggtgatgtctcgtcccacaccgatccaaggggcgtggtgcgaagagcgtatgtcgaaggcgaaggacatcatgcgcgagggcaagatcaacgagcgatatcgtagagtgggacggctgaagaccgaagtggactggtcgcgatcgagggctgatcgtggatcgctgatcgcgatcgctgatcgcgatcgccgatcagccaagatgggaagcacatgggggcgaagccaggacaagaatccagtagttgtttagttgtaggatggtaggtgagatggtagcggtagagagacaccagctaaacataaatcagagcagaatttgcaccgaagagcacaagtcccctaaagtcgtcaagtcccaggaactacattggcctcggcaagcatcgacactttggacagtgagctagtggtacggttaagactggattaatacattggccagcttgacctactctagcgatctatttcttgtgtgcgaaccctcgatcgaccggatactgcttggccggcgatcgtttctcctctcgatcaacctcgatcccgctataggaagcagcaagcaactcaggaaaggaatgaacatacccggaaaggcaactacaggccttggatctactccaggccgaccgatcgaagcgatgaaccctcgatcggagcatacactcggacgcagagcgaagactaccgcgctgttccacaaactatccccgcgtcacgccaagacactcgatcttcaccaagtgctgcatcttcggagccccgagagagcagatccagcccgccgatgggtacacaaggtgagaacaagttcagccgatcacggatcattggagaaccccctccgttagtcggtgtctgggcgctggtgggaagctcgatcaggccttaaccagattttggccgatcccgctacaccacaatggtgcgcgtgcccggatctcttggggactccggatttcaccgtgagtccgtagaagatgcgcaagtgaagaaagaaccaggggaagaggcgtcgtcggatatcggatcgacgaagacgctgctgaacaaagtaagatccgcggatcgacagagtgctcggaggacttctgtcgacggaatcgagggcgatctggagacagatctagaagacaaacctcaacatcctccccaggtcccttcggggaccccggtggatcttggtgcgaaccgagattcacttataaaaaaaactaaggcgggatcggaccgatacgcgttcgctgactcgccgatcaggctcgatccgggctacctggacgcgatcgcggacaaggcccagatcgtgaggaagaagctgagagcgccaggcttggacgacgaagatcccagaccgtcggcgctcgactggtctgaggctgacctggatcgtcagtatcacttggaggaactgcgagacttcttgcgtcaagatcctgtcatggtggtcgtgcggccagagcagatcgacgacccgaagggcccgatctcggccccccgagtgacggataacaagctgatggcggtgaagaacctgctcgggctgttgaaggaagccggcttcgtggctggcgcctttgaagcgaacgatcttttcgatcaagatgtgacccagacagcgatccagacattggtcgacaagttgagacctttggtcgacgtgatcgcggacagtccggacccgaaggtgccagatgtagtttcgccagctcccgcgtcgtcgccgcggatggagtccactgggtaccgatcgtcgtctccttatgtctccgcagcggaacatgtatcggatacgtcgtctgaacctcaacggatgtcccttggcccttcaggatctgcgatgttggacgcacgatcacggagtcaacgtcaggaacgcatgcgatcaggacctcggaagcagaaccccaagtcgaccgatcggaccaccagtgccaccggatcggatgagtcgaatggcagactggagtcttactttcaggctgcgatgacccgatttccgaaggaacaacaggccacggtggtaacacctactccagtggtcgacgacaacgttggatcgcgggacgtggagatggaatcagccggatcaccggatcaagatttctcccagtgggaatacgatccggacgatattgataatcaaattgcattacacttttaatagcgcgagttgcctggctagctaaggtgttgcatccggacgatattgatctaccgagttcggcccctgctgcggtggccaccgctgcctcaggatccactgggtcctccttgatccagcgtgcgcggatttcggcgatgtccgatcttaaggagttcagtggcaaggatcaggacgaagagaagtgcctgaccttcgctgatctactgacgggcccggcgaagaactggtaccgccagctgggccgatcgacgcggaacaagtggagcgatctacttcggagtttccagatccagtattgtggcctgggagtatcggtcgcttggcagtattaccattctcgcaagagatcagatgaatcgccgttggagtacctctatcgactgaatgtggcggctctgcgtgcgagattgaagatcaaggacggagattccaaggcccgccgagaacatgtcgaacactttatcgagacgctggggcgatccgaaactggccgatcagctcccctattccggctttcggacgcggaagatctggaggaagtcctgcgcgctcgagagcgcgcgaagagcagacagaagcgatctgcctttggatcgaagtatcgtcagaaggttccgacctcagcaccagctgctgcaaccaagcgggcagtgcgtgcagttcagatcgcgagtcaggagtctggatcggacacaggatcggacggatcggactcggggggtgatctacgtcgcgtttacctagcgtcggccgaggacaagtctcgcaacgctgggggcgacgcgacgaagccggatcgaagcaaccaagcgcagatcaaccatgacccacctcgatcggatccacgatcgcgatcttcacctgacggatcggagcaatcaagccgctgctcacactgtggatcgcggaaacacaccgatctcgattgttggagtcgtttgacgtgcgagaagtgtggcaagagaggtcatccggcggatcgttgcctgttcgtgtgccgtggatgtggtgaactacacgagatgggcaagtgtccgatggaggaattctacaaccagatccgtcaatggttcaacccggtgaagcacgctggcatgttgcccgcgatcgccgagaagatgttaaactaggacgctcgccgggttggaatccggtacgagccgagcgttctaggtactgcatctatgcattcgtgaacaagaacacggtagatcgagtaagtggacggactgatctacgcggtaatacatgtgatctgcatgcgaaatctaccgccaaggtcttaagtctacatcgatcggacgacttcagccgttctgacgccgaagtgcccttggatctccagtctggagaaacgcggggctattggaagcaacgcagaccggaataatggttcaagccagctgatggagaagtgacgaccgagatcccggagcgtgatcccgatcgaagtctgcctcgcgtcagcgaacaccgcagatatggcgatgtggtgcccgatctccttcctggggagtccagggggtacgggaaacatcattcgccaggtaagtggttccgtcaggccaagatcactggcaagatcaacaatgagaagtcgatcttactcttagacaccggcgccgaggtgtccatcgtggacaccgcctttgctcgtaaggtggggtgctatgtcgacccgagtcagggccaggaatgtgtggggattggcgaaagcgtgtacatgacggaaggaaggaccaggatcaaggttacgctggcgggatcgctggtgtatttctttgatatctgggttggcgatctatcaggacaagagtcgatcctgggtatggactttatggtcccagcggggatccgcctcgatcttgcggacggcgccagctgtctccccgacgaagtcaagatccagcttagcggacggcgccagctgtacaacgacaatgtcagacacgtatgtgtgtgcagatcgcgatcggggattcgatcgaacttccgctacgaatgaaggtgacggattgagaaaagctatggatcacccgtggagatcgctgggtgccgaccgtggtcagaggacccggcagaatcagatatctccaggttaccaacatcagcgacaaagacctcgtcttgcatcggaacgaacggatcgggatgtggctggctggagatcggataccccggatcccgggataggtgtcgatcggatctcgtcgatacatggaatggcagaatgtagcctttcaagccacgacagatgactggccgacgaaccaggaagcgccagcgggacctccagtaccggcggtcgagcgaccgacttatccaacgccccgagccattctccagagacgcaaggtatccccgatcgtcgatcggtcgacggtccatccgatccaacaagcgaatcggaggcaatgagccctgatccgggggcggccgtcgttgatactcttagatcagggggcggaccgttgcaggacatcgacgtgggcaacgcgaagccgatcgctcaacgcgtccggaaagttgcccctcagttcgtggagaaggtgtccgagctgatcaagggattactgtcagccaagatgattcggaaatctcgatcaccgtgggcctcgccgatcgtcgtgatcatcaagaagaacggcgtggatatccgactctgtatcgactatcggctcgtcaacagtctaaccaggctgatggtatatccgatgctcttgatcaacgatctgctggaagatctggacaaggtactatggtattgctctttggacatggctagcggattctgggtggtgacaatgaccgatcgagctcgtgcgatctcggcctttatcacccacatgggtctgttcgagtggaaccggatgccgttcggcctgaagaacgcccctcagatctatcagcgacttctcgacgacgcgttgtatgggttcaccaggatcccgcgatcgtcggactgtgaagtcactacggacttgatcgagtcaggagaaccagaagatccggggcgtctatcagtgctaggtcgcagatcgtacattgatgacattcttgtgacggccggatcatgggacgagctgtgtgatcgcgcggatcacctgctggacgcttgtgataagtggaacctctcgatcagcgtggagaagcgctcttgggggatgcgtaaggtggactatctgggacatcgtgtgtcgaacgatgggctggaggccaatccgaaggatctcacggctctgaccgatctgccgttccccggatcgctccgatcggtgcagtcattcttgggaagtctcaactactacagccgtttcttggaagattacgcgatctacgcggtgatcctgtacgaactgcacgaggtggacttcgccgagctgaagaaacgccccgatatgcgccagatcctggatcatcaagtaccgaacttagtggatacggacccagtgaaccccgatcgaactccatcagttcctgaagtcggtgtagccgatgaacgctggatccgtgctcatcgtgccttttcgaccctgaagatgaagatcgcgacgacaccgatcttgcggcacttcgatcgcgatcggactccggtcgtgattgtgtatgcgagtgactgggcgatctcggccgcattgatgcaggagcacgaccagatatatcatcccgttaccttcgccagtcgaacgctgaagtcgaatgaattgaactacaacgtggtggagaaagaagtgctggcgctgttccggatcctggacctgaactataacatgctggttggacgatcgatccgggtcttgacccgacactccacgttggtgtggctgttccgatctcccggtcttcaaggccgattcggtcagtgggctgcactcctatcgccctggacactggagatcacgaagtgcaccaaaggagagaacaagataatgggggcgatcgccgctagtattacgcctcgatcggatatggacgacgcgttgatcgcgatcgcgccgaagaaagaaccccggcggaagattcaggccccggtcccgactgtacgtgcggacgaagagcacctggtgataagtttcgatggatctgcccgcgtcaagcgaggcgggggtgcgtacagtgcgatcttgtggaagttacccgtatggagtgtggtgaaggcacgatcgggctatgctgaagggctgactgttaacgaggcggagtatcatggtctgttgttgggtttcgacctccttgacggcatagatcgagtcaggttagtggtctgcggtgactccaacctggtgatccgacaagtacggggcgagattgaccgcaaagcacctaagctgacattgttgaagcagatgctgctggatcagctacggaactggccagatcacgagctgttacatgtgaaacgagactggaacggaagtgcggacagcctggccagtgcagcactccaacgtgaagggggcgtcgtcgtcgaggaggatgccgatcatggggatctagtgacactgaaccgacttgacgagatcctggtcgtccggtcggatgattcgatcgcccgactatcgccgatgacaacccgatcgggcacccgatcacggccgaacccgaccgtcatgcaggaggagttcgtgcgagggttgcggatcgatcggattcgtcgagcacatgatgaagaaacgtggatcgcgggtatgaagaagtatctgaggagagatgtggcagatctgacacaggatgaggcccgatcctatggcaacctcgcagcggactacgagatcgacggtgataatctgctgttctattgcccaccctccaagcgatcggaggcagatcgtgatggactgatgagactggtggcaccggagacgctgcatcaagatattctgcatcactatcactccactctggaaggtggacaccaggggatcgggcgtacctaccagcggatccgcgatcattttcactggagaggtctcttcaggagtgtgcagaagtacgtcggtgaatgtatcgactgcgagaccggcaaaggacgacccacgatcaggggcaagtcgccggcgaacatccaggcgacatacccgttccagatcatagcgatggatcacataccttcgctgccgaagtcgtgcaagggtaatacggaactattgatctgggtcgatctgttcacgggatacgtgatcgcgaaggccagttcgtcccgaacggcgcagacgatcgccgagtcttacgaagagtgcgtgttccggcgatttagtgctaccgaggtgatcaggcatgatcgcgaaccggggtttatggccgacttcttccgcgcctttaacaagatcctgggtatgcgtcagcgagcgacgatggcatatcgacctcgagctaacggtactgcagagcgaatggtatagacggcgacgagagccctgaagatgttcgtggaggatctggatcagagagattgggatgaatacgcagagcgattgaccttcgcgatcaacacggctcaagatcgagtccgtggagactcccctttttatctggtgcatggttgggatcctcgatcgacgctcgaggcgacgatacctttgggtagtactcggactcgggatcggaaccctcgacggtggcgttatcggatccagaggcactacgatcaggctcaaagtcaggtgaatgctcgcctacgcgaggcgatcacggatcgggccgatcgacacaatgaagaagttcgaccgcactcgatcgaagctggatctcaggtgtggctgtacctggatcgtgtgaaagaggggtatgcccggaagctggctacggtccgttccgcgttgcggagaaggtgaacgagtacacgatgaagctccagatcgctggtacagactatcacctgttcccgatcgtgcatgtgtcgaagctgaagttggtcagagacttccccgatcgaccgcagatcgcgctcacggtgaacgaagcagatcgacttgattttgacgaagtcttacttccggaggacagctgggccccagatcgagacgcgaacgagtacgaagtggagaagatcacggatacgagaacacgccgcaggactcggtatggccggacgtatcgagagttcctggtacactggaagggttatgacgagcctgactgggttgacgaggctgatctcaactgtggagctctatagtacgaattccttcgagatcgcgtgaaccggaaccgattcagcgcgatgcggtctcacgaggaagagtgagatcggaccgccagggcgagctggtcgccttggtgagcgagatggatgacggatcgacggggaggccgtcgatcagaggaaggggttgtatatgaatgagtgtgtgcatgagagtgcagatcggaaggttatggagcgatggcaaggtgttatgatggtggatcttagctgatcgtgctggaataagtggattgatccaagactgttgacactcggcagagaaaatgaagtattgcaatgggatggattgatcagaagacgtcgggcgacgattaaagaggatcggcctccgaatgactacgacctcgggtgaactgactaaccgacaggctgatcgctggagccgaccgtgtgagctggactgatattacggctgctgggcgccgacattggggttgaacttgttgcgaagacgagggatctgccgggctgggtggtcctgagcggtactggtttcgccaaggatcgtgggtgtctgcctcgatcagagctgtccgaaggtcggtcggctcacattgatgctgggtggggtcgccggcgttcgcggcccgggataccacgccaggataccaggtaccaaagtcccgcaggtgaacagggatatgtaggaagaacggatcaagcagcagatcgaggtccgcccacatatcacgcatcactggcagtacatcgcggaggagtcgccgccaccgatcaccgacacggattcgccgtgttcgacgctcttgatagtactgatcgccgacggggtcggcatcgcgctgggtaccagtgatcgggaggtgatgagtggcctcccagagagcctgccggttccgctcctcgaatcgcaggtatgcgtccgcgatccgacccaatctagtgccgttacgccgatgtaatgcgagatcgaaggtcagaggacctcccgggtttcgaaggacctgccaggggcggtcagccatcagagccgtgatgttggggctggtgatcaagtcatctcgatagcctgttccttcaacaggctgtacggcaccacgaaccaagagcggaaagagccatcccggaggaacgggcagctggcggaccagagtcgactgaatcatggcagtgatctgcagctggctcaacaacatcgaaggccaaggctcggtgtccgcttgggtcagtaccctgggagcgttgaagccaggaatcatggtgccgatcgggaataatggcgggatcagaggacgtggccctggtgatccagggggagagccgggcggcgatctcggaggagacgatcggggcgaaccaccggcagatcgaggtgtacctctggagtgtcgggagtgaacggagcctgatcgagagtttatcgactggactgatggcgatcgagatcgagtaggtggggcgcgacgagtaggcgaggaggattgacgacgacgggcctccgatcgagaccgggtcaacgccgccagagcctcctgatcggttccctcggactcagattcgtcctcaccagaagcgggctcatccgaagccgatctgtccgcgtcggactgatcagcctcgggagattggtgcgatcgaccagactccgcttgatcgggctcttcctcttcaggctgttcgtccgggatctcgatgatctcgcgtcgatcgggagggggttgattctcgggttgctcttgagtaggctgatcgcggccctgatcagaaggaggctgtccccgttgttccgcgggttgatcttcagctggacgttcttcgtggggcggttcctcatcgttgtcgggcatggagaaggaaggcgatggagattgtggtatcggaaaatggagattaccggagcgattgcccgtcgcccaagaatcaaggtacaataatcaaggagcagtcaagcgcgagttggagtggctgctttggttaagctggcgacattatcctcgttggagtgacaggtagtggccggagcctcgccaggccctaatacaaccccgaacgaggcttcatggtgcctactttttggtacagatgcatttagttacgtaattcggccgcacttattagccgcggtcgtcatttgatgtatccgggatcgcctcattgcggtcgttcacactagatatttgtatagggacataggactcatcataggatgaccagaacgaggcccccaaggcctcagaaaactcagtaataaaaagacagtcttcccccaaagccaacaagggtcaagtccgactttggtaagtgtagctagcttattgtagtgcctggacacgctcggctgcgtgtggatgcctgtcggggagcttatcgtgcattgaccgagagtttccttggtagcgccaagagttggcgcgtgaacgcgaacagatagtccgcatcaacagcaggctcagctaactgtggcagccccattgggaccaacccagtttcagttggcgggctgcctagtttaaatgacttccatacaccaggctttgcagctctggcgacagacccttcttgtcgaccttggacttcaggagcttggtgagctcgtgaagtgcttcacactccccagcgtcgtgcacctgtttgcacagtttgcaccgccggtagcagaagtgcaccgagtaggacgggcttccgcacgcggcacacggcccatactggcgtcgaccatctcgttcacggttggacgggcctcctccgttcctgaagcgtcggttatcagaccgagcgaacgttccttcggctgcggccctgcgctcagcatcgttagcagcagcgacatgtccggtagacccatccgagtcgtagtcagcgtctgaatcctcgtccgagcgttggtcgtccgagtattggcgctcatcctcgaagtaatcctcgttcgcctcagcatcacgtcggggggcgtatggagcctcgttgcgtgcaccgaccgagcctccgacgttccattccgccatcacatcggccagcgcgtcaaccaaagtgactcgggactggtacggcgatccatcgcgtcggtcacggcgacggtcgtcttcactgcagtcgttgcggcggtcgttgtcacggcgacgtcgttcgcgacggtcttcgtcgtggtagcgtcgttcgcggcggtagccaccacgagaatcctcgttcgacctcgcatcgcgtcgacgtccatcatcttgactccgagagcggcggaacgacgattctcggttcgatttgcggtcacggtgacgcaggatgtcgttgatcatgtcttcgaggtcatggatgctcttgacccggacgtggcacagacggtcttctaagtttcggtcgtcacacgtgaccaagaagtggtccacgtggtccttcgcgtcacgaccaccgttttcaaattgcacaccggcgttgcgagcgtagccgttgagccggttgaggtagtcacaaacgtgttccttgtcttcccgcttggccgagtagtaccgagccttcgcagactgggaaaacgtcgagcaatagtacttgataaacgcctcgctcagcaacttccacgtgcgtcttgtcttgcgtgggagctggcgacaccagtgcagggctccatccctgagcttaagttcgaatggcatacaccactcgttgggtggtgcatgcgttcccttcatctcatagatgaacgttcggagccactgcatggagtgctcgctcttgtcgcgcgttccgtagaacggcttgatgttggcgaaacgcaaatgcgtggcgatctcgagctttggggttgagctctggttgtcggtcgcgcttagctcgcgcacctgacgtgcccattcgctcggtaggtccccttcgtagtagtcgggcccgaggtcgtcgtcgctgtccgacgaatcatcttggaggtcgtaacgtcggccggaccgacgaccggtcgctccgcgcgtgccaggcgtggcgaatgaagcctcgttctccctagccaggcattcactacggtccgtagatcgtggagttaccatgtgcgagtcttgcatatacggcgaggcttcgcccttggttgcaaagacaccgtcatcagtggctcccttccgaggggtcgctggtagcgggaccgtcgacgggtctactgcctccgaggtcgaacgaagcatcgttgggcctcgcgaactgacgtccgccactccaaaggcattacgcagcttcttctcccacatatggttaacgccgtggtagcggcggtcggcgtccaactcgcgagcgcagcctccgtcgggaggatctggggttcgcaccccatagctcgcaggaggtccacagtattctgcgcaacgtgccgagtgctcgatgagttgatcggcgtagccaacgcccctccgaggtccatccagatggcctggcggacatgcttcggggagaacaactgcatccattcgctcttggtcttcatcaagtctaggcaccggcctaggaccttgttggccgccggagtatccccgttgaggggaggacgagtgccaaccggcttggaggttgcccctcctaccgtcaccgagggtttgaagtcctcggtggcgccgtcatccgcgtcgtaggcgggctcggggcccggcatgtccttgaacgtgtcggagaggtcgcgggtaatcgaccttgatcctccactgcgacctgccgacacaaccgcagcttccgaagtctcggacatcgctgttcggacatcccagtcatcatcttcgtcatcttctttggcgtccgaggaatcaatcgccgtgtcgtagctcaccgaacgctcgtcaatcgactccatccgatccgtcgttggggtcgagattgagcttccggagcgcaccgaagtcccgttgcgcgttccagtcgacttggccggtgttgctggtaccgctgacttgactcccttcgccatctcctctcttcttcttcttcttcttcttcttcttctccgcttctcttcttcttcttcttcttctcttcgctcgttgggggtaaagatctacaacaaccaagacacacagaaggtcacaccaatcccgggtcgcggcaccagttgtggtgtggtaataccagtaaaatgctcctctaccaaaaggtattagagacaccaacaacacgctaacccgcaaaggtaagcgcttattggatcaaaacctgaacaccaggaacgatcccttacaccgggtcggttgcaagcgcctttgtgcaccttaggttgtcttcggtcaacccaaaacctgtaccactagccacgagcttaggctcggatactatgtagcgctttcgcgcaaccccactgcagtccctcagaaaggaagggtaccggcgtgttagaccttatacagggggaccaaggtaaaacctcggtaggtagactaatacactcagggacactctaatcccacaaatacataccgaacgatactctaataccgttcctgcctctccggccacgccaactcttggcgctaccaaggaaactctcggtcaattcacgataagctccccgacaggcatccacacgcagccgagcgtgtccaggcactacaataagctagctacacttaccaaagtcggacttgacccttgttggctttgggggaagactgtctttttattactgagttttctgaggccttgggggcctcgttctggtcatcctatgatgagtcctatgtccctatacaaatatctagtgtgaacgaccgcaatgaggcgatcccggacgcatcaaatgacgaccgcggctacactaataagtgcggccgaagtacgtaactaaatgcatctgtaccaaaaagtgggtaccatgaagcctcgttcggggttctattaggacccgacaaggcttcggccactgcctgtcactctaccgaggatagtgtcatcatccaatcagaagcagtcatctccgtctctcgcttgacctcgccttgatcgccccttgattgaacttggttgtcgggctggcgggtcagcagcgttggaaactgccactttccaataccacataaagcatccaggcgacatcgcttcgcgcgtatacgcccaagtcttggcacgtccgccaagattggagagcgcaaaggcgactcgaaggttctcggccgagatgagacctgcacgcatcgcggtctcccggatccagaagtgaaggttctcaccttccttcccttcgaacggaggcacagctagtcgcaaaggcttaggctgcacccgtttgggctcactcatctgagccagcaggtttttctgcacatgaacgatgagcccgcgttcgtactcgtcaaacgcgctcacccgctcgacctgctcgactggcgtccccgccaccaagctccggagggcatcatttccgaagatgcccgccatcttccgcactgactcgaaccgcgaatcagtcaagtgagggaactcacttcggtccatcgtggctcacgaacttgagccacagaggattcaggtagaccaatctacccgcgtaggcgtaggattgactacaagtgctaccaggtgtgatggggtcacacagcacaatgcacagggaggaagtgcgtgcggatattactatccaggtgaacagcagttcaccagttcccgcctcaatgggaacggtttgctacaaacgagtaggttataagactgactgtattttggtagaggttaacttggtcgtaatacaaactacaagttaactatacaaaagcccacacaaattcaaatggttggcttgcgggagttactggtaccatgtaccatgtactcgggagagtgacacccgtcactcttcatgtaatgggtacacttgattgtatcccgttacacaaatacttacggacgctccagtacactatgagagccatctgaaggcgtatcaatttgcgccataatcgaccaagcttagctgaagataaccaacatgacttgtctaggtgcaggctgcattttttacatgtcaatttgctcaatacccgaagatgcccaacctcgtgtctgtcgccaaaccaatcagctcaactcgacagtgacacgagcatcgttcgtttgaataagactttttccctgcgttgaagcatccacttccaaggaataggcccattagcgtatttctcattccgcaattcaccccccaagccctcaagttaaaagtttgtttgtttgtttgtttgttttgtttttgaattgaggatcaatattgtcacttagctaacatcctcaagttaaacagttaaaaggtcaagatcagcgcaccatgcgtctctccttcgttccactactgttgctctctcgtctgatcgttagcacacaacatagtacaaaaatgggcacagtataccttacctgcaaaatgaatgaaatagctctctcgttgctggtgccaacgcagccattggacgctgaccagggtgttatgtcaccgatggcctcatcagaccaggcaacgaaattggtgactttcggttcctgagaacccaccacgataaagaagagcggggcttgctggttaccagcctcacaaaggtttggctgaaacatcatttccgcatcgatacacttcgatgtgcgcacacatacaactatttgttcaattacgcattctcgggcagatgctgcggctgtgaagcaggcgcagtagatgcccacgttagaatcaactagagagttgggctggtagtgctttcaaggattaaaaacaaaacaactttgggatttactcaactattatccgttatcatcgtccatgaaactattcgtcgacctggacgagttcgacgacgtcccggagcggccggagcaacgtgtaaggtgtagtaaatcagcgtaagaagaatagtgtgtgttgtcattatagggggggctttgccaaaaaaacagccaatcatgacgatgcaatagtactatgctacagtttcgcgttggtcaaaccaacttggtgaggtcacatgccttggtcagcccgcgcgtgcagcggcgacgccgccgcggcgctgctgcagcctcagcaggtgctggtcgcccaggacgacgctgatcggcactccatgaagcagctggacctggtgcgcgtgctcttcagctcgcgctcttccgtcctgctggagtgcatcgtcgaccggcgtgcgtcctccgggactggcgggcgcattcagctgcacccgtgggtgctggacgtctgcggacagctggaggacgctgtggcgacgctggagaaggtcgaaccggccggacccgcggcctcgtggcgcctgtcgctgagtctgcagaccaaattcccgcccgtcgccacctccgggagcggcagcgtcggcctggagctgggcgactcccgcacgcacctgctgcctgagagcgttcggcggcggcagatcgacctggaggcagccatccgacgccagatgggcgctgcaggggcgctccgggccccgagagagggacaactggtgcctgtgaggctgctgggggacacgtacgtcttccgcattgacgacgcagcgagaacgagcggcgagtcgagcgaggttgcagtgaaaggatggagcgatgctaccaccagtgaagcggcgatggtagaacaggcagagactgtagagctgaccaagcaggtggaagcgctgagcattcaggagggggatcaaagcggagcagcaggctcggcgtacgaaagcgagctcggttctcggctctggcacacgggctttgcagggtacactgcattcgtgcaaggcgtgctgctcaacctcgcgctcgtgctgaagcgtggacagaagggccctgacgacgagagtgagatggagcagatcggctctcacggcgtcttgatttcgggcgtgaatggcgtgggaaagtcgctggcattggtagcattgcaacgagagttactgcgagagaagattggaacgtggcgggtagacgggatgtcgctactgatgggagcggagagcccagcattccctacggcgtacgagtatttgacccacgagctcgaacagaaattcccggagctaggatccctgagtgatgctgagacttcagcatctttgtgcgtcggagtcgtgctaattgacgatttggacgtcctattccaatcagcggatggtctggttgccgatggttctgacgcacagctccctcagcttggtagctcgttgctacggttaatcgacgagctgagcgcacgcaacgcacattttgctatcgtcggaacgaccacgagtgccgatgcaaatgtgccacttgttgccaagcgaacagggcggtttgggaaggtgttggacttggttgttcccacagaacagtcacgtcgcgagatcttgaggcgccatctcatcggcctgccactgcgcggtgatgaagaaatgccagttgctgacaatgcggggagcctggcctcacgcttagcgacactgactgggggctacgtagcgaaggacctggtcaggatctgtaggaatgcggctgcccaagctcacgccgagtcgatcgacaatggtcgctctatggggaggccgtcagtcggatgggcggagctattgcacgcgcagcagcaggtcaagccatcgcagcttcgggagctgaatgtggcatctcctggagcaccagtagatgggaaactcgtgttcgccggctacgcagccgtccaaaagcaactttttgacttcgtctcgtggaaattccacccgactgaagcgatgaatgtacgtttgctgcatcggcttgctgtattgcggtactttactaatggcaacctgtgcagcgtttggggatctccaacgcgtctggaattttgttgtcaggcccctcaggttgcggaaagacattgctggtacagacgttggcagctaaggctcaggtgaatttcgtgtcggtgaaggtgcgtgctttgtttcaagaactttgacttcatttgtgttctaaacttatggtttcgtatcgttgaattcttttgttcacagtcttcagaacttctctccaaatacttcggcgacagtgagaaagcggtccgacaactctttggtatgtggttaattgatctgcagtcatcactttatattaactaacacttgcgtggtgtaattgtctagcccgagcacgagcagcagcgccttgccttttgttctttgatgagtttgattctatcgcccacaagcgctcgttcggcgagggcgacggaggaagcagtggtggcggtgtttacgcgcgagtgctgtctacattcctcaacgagatggacggtgtcggctcgcaacgagtcactgcatcgtccgtctcgcatgcgaaggggttcgctgcatcggaaagcgggggcatccttgtggtagcagcaacgaatcggaaagacgcgcttgatgctgctctcattcgcccagggcgaatcgacaagaccgttgaattgggcttcccgacacaagaagatatccaggtacgcgcccagcgaatgcttcacgctttggacttgacttgacagcgttctctcctgtggatgatctaggacatcttcgctcattacaccaggaagatgccgctggctgctgacgtcgatatccaagctcttgctgaacgccctagagggtatcatactgaccttgtgcacttgcctcgatacatcattgcgactaacgccacttatcttgcgtttgcatcgacagttctcgtacgttcacgggcgccgacattgcggcaatttgcaaggaggccgccttccgcgcactccgcgaagatatcgaggcgaagactgtgtgctttcggcattttgaggctgcgtgggaccagcgcgccgaagcaaccccaacgtacacgacaccggctacagcaaaccccgagtccatcgcaaagcccaacccgtagtgctgtcgcctcgaccaagagcggctataacttagacttccaaatagacctccagctctcatcgaggtgagagcgacgagcggccaggcacgtcgcgcgcgatgattttgagcacctgacgcaggtccttgcttcgagctgacgctgctcgttcagctgatttcttctttcgtgctcgactggaactcttctgggctgcttctgctcgcgccttacgcttcgctcctgtagttcgaccaagggtagctctggactccatacttcggccagcagcgtcgtggactcctgaatcggcgaatacggtgccaaagggaaaaaaggcctggaggaagggatggaacaaggcctgctttgctgtagctctcgtggccggattcacgtccagcagactgtagatgaagtcgtggaagtggtgactccctggcgctgcagcttccagacgcgcttgcagcgacattgactcttcctgcttcttcgcgctcttgcttgttgtagttgctgcagtgttctccttgtaccgcgtagcagatcgatatggggagcacgccgcggccagcgaaactccattcgtcaccacgcactcgatctgctgcaagaggtcgtcgttctcgagtctggcaacatcagcgtgctcttggacggacgctcccagcgccggcagcgtgaatagcggcttgcctgtcacgcactcgagcagcagacagcccaaggaccacatgtccacggcagagcaaagcagcaggcccgcagccacctctggagcgcgataggtgactgtctgcacgtcaaagccgccactcccctcctcttcagcgtacgccgctagctcactcacgtccaggcagttgccaaagtccaccaacttgacgggggacgagcacgccgacggcgacgtcgatgattccagcggagcttcagcccctgaccgcaccacgttctcaggcttgacgtcggcgtggatgagtccttggtcgtgtaggaacgcaagcgccccgcaaagatgcaccgccatcgctctcacgtcagcaatggacagaggtggcgctgacacaactgcatcctcctccaatggctccgtctccggcccccgctgtccctccggcgactgaatcccgccaccggctgcagacagcgatgagcgtctccgcttgagcttgaagagctgcagcgtgcgatcgggggcgcgcgtcgctccgccgggcgcctgccgccacgggccccagcgcgcgacgtccagcaccggaggcccgagcagctccagtacgaggcagaagtggccctgctcctcgaacgtctccagcagtcgaacgactagcacaacaacgagcagcaacagagtcagcatcggagggccagggagggagggaggggacgcaccagcgcaggctccgtccgcgtctcgctcgttgactcgacgcagcgctgcagcttcccgctcgcccagcgcgttgaggcctcgctgccgcacacacttgatggccacgtggcgctgctgctgcacgtccagagctctgcagcagcaatcgaatgagtgggtgagagaccagcgaagagagctgacgcttcagagccgacgaacgaacgcaccgcatgatgacggcgaaggtgccgctgccgatgcggcgcaggaagcggtagcggccgtcgcgcagcagcgtctggccttccaccagcgactgcatttctcgatctggaatagtggcgccaaacctcggaatttgcaattcagtcaggtttttgggtgggtatttgctgttcggtcaggcgtttgctaatcagtcttgtgaaagtccgcgtgatcaacagggaaagctacaggtgaaagagtttgtcaatatgtattgtgctttgcacgaactttggcatgcgattaagggctctaaaccaacgagcaaatccttcccggtgatcatatctcgcacaacgcagagcaagaacggagcggttgccactgcaagaataaatcggttgtcgctgcaagaaaacaaactgataaggtccccgatagaatggtgccaactccttgcataaaagtaagcaccgatttcggcggggacgttttcttcttcgctctcttcgtcgtggattcgcgttaaaccaagctcgaatttcagagcacggcatatagtagcagtagaaattttctactagaaatgtttggatgtgcaggaaacgctgactttaaagctgcttgcagctcctcgatataaaaacagggatgttcttcaatattgtagacgtataatagtttagtacgatagatcgccacgactagaaagcaatcagacaaagcgagcgagttagaattagaatgtcagggccgtagtattgtcggatttactgcagccattcgacgaaagtgagcataactcaacgttaactcgttgtgttagcagctattctatcttaaatcgacgagttagcctcctaactcaatgatgggctaatcaccgtgatttgctaaacaacgaattacgtcgttgtttagacagaaatcatgcaaggcacaatatttgtattgtaatattgtgtgttctgctcaaaatttccgcgggcggtttgttgaaccgcccaagccaaatctccggccaatctccgtggccactaggattggttataggcacccgtttaagtacgaattggtcttgacatgcgggcacttggaccatatggtttgggcccggagattgagcaaataacttgagttttgtatttggcgattggagcggggtctccaaaccgccgcgatttggaaaatttggccggaattcaaaaaaataatgtatagcgtaaagaaacaagagagtgaaagtgtgtgaaagatgttacaattccatccgcttaaccccaacaaattttatccttaaaataaagacagaatcaaatctggcggcctcgattttggggcgattttgtccttaactggccggttaaggattacaaattatcttagcatttgtatacacgcacttaggtacggtcacagagggccgacagtgggttcacattggacgcgaagggtcgccgacggtttcacttgtttctactattggccaagctatttttgtccttaacttaaggataaactcgaaaaagcgatacgctccgagtgacctttttggtcgagctgctgcgcaaaggtatcaaaaccctagcgcatacaggccccaccctttagaccgaatacagacctttctatccatacctgtcatagcatcttacgtgtaaaaatgaggtcaaaggggttgcctcaaatttcgtccttatgtttatccttaaaaaaatcttgttggggttaagttgttgtcgcaagtccgaatgttgtgacccctctccttacaacgtgaacagacaatcggcgaatcttcgggtacaacttctccacgcctgcgtacgcgttttggcttttttgggcgtccagccttgcgatatgattgagggccttctgtcgtatcgtcccccaatgccgactcgatatcgattgggttcatcaacctggcaaagacggattgcagacatccatatcggtaatacggcgagaccgatgctagctcagacaaatgctggctttggagagcggcacagccatgcacgcacgggtactgatactccacccagagaccgcaggtgcagtggttagcgtccaggtttactacccggtacaagccattctttcgagcaacgtcaaatgttccatctccctgtgacaccacaagccgtttacgacctgctttcttgctggcattcagtttggtcaaaacggatggtatgatgtccatcgcatcgtgacggatgtatttctgttgaagctcaaaggatctccgcatgaccatttgatttatcccagcaatcacattcaggtgagatccgctcctaaactcgccaatactgctattcaccgattctgcagaaatcgaggtcacaatgccgtatcttggtacacggaacacgacgaacggcctgagtaacaccctcatcccggtcgctcatataaaacagcccaaaaatattgttcacaaaaggcaaagcctccaagacgtgccgcaaaaaccacgcccagtcctccccacgtttagccgcattcgaaatggcaactccgatgactaaaatgtcgtgtgcaccagtcattgtggacaccacgtagagggttccgtgatccgcaccacgcaaatgacaggcgtctaatgcaataatcggtagacaatactgaagcgtgtcgttgtaaatgccgtagatgagactcaggcgcttgaacgtgttgctggtggttcattcgaaatgcgcaactgatcctgggatactcgtcaggagcatgtccaaataactttgtaggaattggtagctttgttggagacttagaacggagccctcctgtagctgtttcagcgcgcgccaagccacgttgtaggaaatggtgagcccgtacattctacgcgcccagttcacaactagcttcgcgctctttccatcccgattacacgccatacaatcgcgaacaacttccaccaagaaatccaggcttagttgagatggctggcgctgccgcaaggcggtgtgtgcaacgtgtgtggcggaatgagcttcatccagaaatgttatccgcacaacccctgtcttcgaagacagagatcctcgaagctgaaagggacactcaatatgcgatgaacaaagaaatcgcgtcggtttgtgggcttgttgtgggcgaaacacgagatatgtagtaccgcgcaacactggcctttagctccttgatactggcgaaattccatgccgacggctagctccatatcttcgtctgcatcccccatgactcggattcttgccaacaagcgccaacaggttcttggtacacgacacgataattcgagctgatgctggatgggcgtcggttgcaaccgcctagccgttctaagtgtagagctctcctgaaggagtaccaatgggtcactaactggtatcatcaagttactgcgtttgccctcacagcaccaagaggagaagtttttcaattgagtcaaaatgacgatggatggacatggagagtcaccagcaggaacgaagatgaaagtttcgatgatgactttaggactcttcagtgcacagagaagacctcagggattgcttttcaggccactccattcctctatgctacgccatggcgcgctccgccaaaaacgttggctcgaaatctccgccaaacgattcggaaaactcgagcgaagcgtctccgccacaaaccaaagttctctgttcaacacattttggatcggatgaaagctccagcagacggacatccgtggatggctgcagcacagcaacaaagcccacaacgaatttggaagcgagacggtgttttgactgactatcagcgcaggacgatctaccgaatttgcacgaggaccctaaacctgtaccatggaggatggcctagcaatcgcaagtgctcttacgaccaatgtatgacttcgccagcacattttatgggactgcaagcgtgctcaaagtgtctggcgacggtggattccttcgtggcttggacatcacccaacccaatacgaattagaccagctgatggctttcacggcgtctcgagtagcaccgccgataacccctgatttcatgtcagcggcagcaaacatggttctagattggtcacaagagcaagatgaagcaatgcaagcactatggttgatatggacgacgtgtacccagtgcatgctctggaggatccgcaacaaagaaatatttgaaaacgcgcgcattcaccaaacacaagcggaacaaatagtttggaaggctgcggattttcaaacgacagctgtgatcaagtcctggacttcaaatgcggccacgtatgaacaagggtacagactagcgcaatgctatggtgtcttcaagggagtgccgccgatggaggggccactatttttgcagacttgggccatccaaattcatgtggttaaacacccaaatgagtgccgagcggcttgaattctactaggacccagccaagtgcatgcttttgatgtcgaagtcattggggtacatatcaaaaaaggacctgttgagactcgagcctgggttcatgaatcactggaggcagccaccaaaactctccgtcaagtcgccattcctagcacggtgcatgtcattgtgcaaggagcattgtcggcgaaacaacgcccgcaagaaccaactctcttcgaccaattcaattcgtacacgtgggagaaaattaagatacaaaaggtttctggagcagcgaagctgattaaaatgtcgcgatcgggcgccgtcgccccagggatattcgcttttagcaccctctcttcaagacttcaagagtttttgtgtagacgttgtatacgagatactagcccacgaaggccaccggacaacgtatcaattaggctcagcctgcagaaacttcaggactctatagttaccgcttaacataaatagaagttctctgacccccccccccaaaaaaaaaaataagtgtagagctctcctaattctgactttcacaagtcctgactgattagcaaacgcctgaccgacccacccaaaaacctgaattgcaaattcccctttgaatatacatgtacagtctacagtctggtgtacagatctgtgtactgatagaagcagtggagatgtagaagaagttttcatggagttgggtctttataatctcgcaccgctacctagcttatccgtctacagttgtcctccagaggaagcgcgtccataagggggacatcggcgccacatacacaaaagttaaatacggggggtggttacttgctgccgttgacgccctgcagctgggcgcgcagatgctggacctcggcctccaggcgagacctctcctcctgcgactggtgcagcatccaccgcagcgactgcagctcctgctcgtacgcctccggactcttgccactctgctgcttgctcacctgaccggcgccctgcgctagcaggtgcatgtggctctcctgcgccgccggagagggggatccctgttgcggaggctgctgctgctgctgctggggctgaagccgcgcgaagaacggctgctgtgggagttggcccggagataacctcacggccgtcgacgtgaactgcgtctgcttcatcgccatcgcgttgctcgtggcactggtactgcccgtgacacctccgggcatcattgagaccgtcgggagcagcgtcggaagcgagtccacagccggcagaagtggcgcttgcgtcatgagcgacgcgccgttaaagtttggcgctgccggcgccagacgcgcggcttccccgttcttccgcttcttgttgctggcagccagcggctcggaaggtccacgcttggcggggctgggcttgcgaggttgcttggccttgatcggtcggttcgctggcttggtgctcgcgggaactggcccacgaagacgctggagctcctgcaccagagaggagccgaagcgcgctatctgctcgttccctacgccacacgctgcgagctcctgttcagtggaaggcatgtacagagccaccttggccagcgtcgggttgggcaggatgtcccagggcgcgacgccgtacatgttcaccagcttctgacgccacgactgaaggtgctggaagacaatggcggcctgctcctccgtcagcggcttgagcggtggcgcagctccgttcgcgttgttgctctgctcgggcgtctgctgctgctgcgcgagcagccgcttggtgttgctctcctggatgcgggcaatgcgcagcctcagggtcgatgggtcgcagtagtcggcctcgttcttggtcagcttgtacagggccttctccatgtgctgcgccagcctgggcagcgccgccagcaccttctcgggcgcgtgcggcttgagcgcgcgcaaggtctccacgatcttgccgaccatcgccttgcgcagcgggttcttctccagatcgtcctcctgcgccacgacgttcacggctgctgcgttgggcatggctgctgcgacttgagcgccgccggctccgcgatgcgcgaagagctccgggctgctgttggtctggaagtgcagcggcgagttctcgcccaggtgctgctgctgctgctgctggacgtccgtggggctgctggcgccgctgctgctgccgctggccgccgctccgggtggcagcggcttggtagggctgacccacctgcgctggtcgctgtctccgccgggcgcgacgccgatggccgcctcgtcgtcccctggtttgtggcgccggttcacgctcagcttcttcacacgcatccggccgtccgccgccgctactaccgctgccgctgctgctgctgcctgctcggtgtccgcggcctgccttgaagccgctcgagatggcctgggcgggacggcgcaaaacgggcaatgcgtcgacagtcggcgcggcgcgtcatgcaccagttaatgcgggccgcagcgcgcttctgggtccggggccgcacaaatggccttttcaggggaagcggcgtcccgaaaagacggtaaacggccgtgaaaagggtcatcggcggaaaagggtcctcgcgcgcaacccgaaacgtgacgcaggcgcgtcattttgagatctcccgctgaagtatcggtgtgtgacgtcggaccatacaaggcgtcggtgacccgcaccagacgtgaacttagtcgggagtccacgtgcgactcgtcgcccgttacaaagaccagacagggtgcgacgtcacgaatcgcaatgacgtcgccgccagccgcccaaacgcgtcaccgctggcacatcttcaaccggtggtccccggtgccgagcattggcgaccagcgcttcgccgcggagctgtatctacagcagcggttggttggttggttggcgccgggctgcagcacgcagatcgcgtacgtagctgctgtttgtagacgagagcgcgtttcggcggggtgcaagttgatgcggagtggcggtcggaccagctagcgacgaagcgtccctgcaaatggactacatgtacgactgccacgcgcctacttcgctatatgagtaggagtgccatgttaaaagagtcgcgctgcagctaggccccgctgcgccgtccttgccaggcactgtccaggcaagtcggcaaagtcggcggagaccaatgaagttgccttttggcctgtctgtgcgacgggcaacttcttaacttcaacctagacttacgttgctggatgaagaacgcccgccaaagccgacaccggaactgtgttcgtcaggcgaagcaacacttcacagagtgggtggtgttttgccccgctcggctgccatctgggtcagcttctccacgtagtttatcgctgagctgtgtgcgctgcattcattaactgagatcaacaagccaccctcttggatgcttcacatgccaagcagtgactcgttcccgtatccggacctacgcaactcattcagcccctctaaatagggactgaatgacttagtgcgttcgtttttaatagcgaggtggtggcgaaaaactgcagtcgggacctaaagaacgaagaacgccccgagtgcacacttatggccgttgctaccggtcgcggcataagttccaaaatataacagcagagtatatcccccacgttgtaaaaaggaggaatcgcggagtcaaatatgcgacctcgaatcccgtataaagttgaaaaggctagccaatgcgactccgacgaacagcatgcaagttgagtattgtagtggtcgacaagcacaggtctcatgatcgcaaggactttctgtataccctccaatcgaaggtgccgctctaagcggtataacgcaactgacgttgaagactgaaacaccttttggcgactcggttcctaaacttctgctgtcggtgttttttattgagccgcagacgatcggaaagagaagtagtactctgttacgttctttatctcgaagttccattacggctgccgcatgagccaagcaagcgtacgcgagtttcaagtcttcactcttgggctcaatagtatcgtcgcggcttacagagagcacatgtagtcgagctttttcggtcccgaactccgtaatttttacactactagcaacagctagttccctacaaactaccacaagttggtagcttatcctttagctactcgcattataacgttttggacctatacaatcgagccaaaggatcaaacttcatgaccctttcagcctccaattatcgctaccgcgtagccattgcgtcaagttactccgccatcccttgaacgaacccaggtccgcccactctgtgacgagcacgagcacagttccggtgggcgttcttcatccagcaacgtaagtctaggttgaagttaagaagttgcccgtcgcacagacaggccaaaaggcaacttcattggtctccgccgactttgccgacttgcctggacagtgcctggcaaggacggcgcagcggggcctagctgcagcgcgactcttttaacatggcactcctactcatatagcgaagtaggcgcgtggcagtcgtacatgtagtccatttgcagggacgcttcgtcgctagctggtccgaccgccactccgcatcaacttgcaccccgccgaaacgcgctctcgtctacaaacagcagctacgtacgcgatctgcgtgctgcagcccgcgcgcgaggacccttttccgccgatgacccttttcacggccgtttaccgtcttttcgggacgccgcttccccggaaaaggccttttgtgcggccccggagggcccagaagcgcgctgcggctgagcgtgaaagctcaaggagttgcagtgttgttggctgcaagcgctgaagagagatggtaaaagtcgctccggttgttgagctgttgagctggtggcaacgcaaaactcaactacctggcgtggatgatagtcggccgagtcattggaatgcaagtgatggcttacttgcttacacgtagcattctgcctgctgccctgtaggagtcgacgcactcaccaccgctcgaaaacacgccgtggctgccgtgcacagtagtgcttggttcgttgctcctggaacagtacacgactaacagtacacgactaacagtacacgactaacccctcatgcgtcaagtgcgatccctatgctgaaagcgtacacgtacgctgtagtcggagagcttgaaacaagggaccgcatagagactttagtcataaggagaattgcggcgacagcactccttgttatggttaacgtggccagctccatgtacggcagctactctgattcgcttgcatcgccagggatctccacgcgcagcagctcttccgtccgccgcccagcgtgcgccactatagcgggctctttgagcgagagagcgcagctcgcgccaacgaagaacgtcccattctcagagccgattcggttcgagcagaggaagtggcagttgggcttcgcgtagtcgcctgcggccagcgcgtctatgactggcgtcaagcgttgtgcccagtaggaaagcgtcgggtacggcgccacgtcgtgctcctcgaagtcgttccaggcgcaggcaaacagcagcaagtcgctcttgttatccactgcgtgggagccgaactcgtaggccgagaacggagccttgaagtcgtccgggttgatatccatgcagatcccgaacgagatggtcttgttgagccacgggcagtgccacgagcagaagccgtcccccgctgtggcccaggacttgtcggtctcgtacaggaacgtctttcgcgggttgagcaccagctcgccgtcgggacccacgactagcatcgagttgtagagcagcacgccagccttctccacgtagccgcaggtcaccatgcagtgcagtcgccgcgcttggcgctggcaccagcggaaagtcggtccttggcccgctacctccgccacctgcgccacctcctccttggtcttgaacacgtagccagtgaacgccatctagcaggtgggatgccatcaaagcgcaaggacatcagtgagcttccgcatcagcccgctagaattgaggcccacctccgacagcatcaagatgtcgattttgtcttcttcagacagcgacgcgaccatcttgctcacatgctacagcgacacacagaacaccatctagcgtcaatgcatcaatgagcatcatgagaatgtatcagccccccccccccaagcacgaacctccatgttgcgctcgacctgcccgagctgcgggtctgcaagagcgcagccccgggtacacaaccgcagcacagcaaccttcagtaacgcttcaactcccctgccaactccctcctcatattcacagcccgtagcgcaccatactgcacgatagcgatctgcatccttgccgaaaatttctttgtgcgaagggtttgagcaatccatttttacccaattacctaccttcctggcagcccagcagcccattagcctcgcccggcctccgtccgctgcagctcggcgatgagtttgggcatgtgcagccgcagttccgtcactcgcttgggggttgcgtactcttgcagcgtcgctgcctccgcccccgctgcgttcacgtgccggcgacagaagtactcggccagcaccagcacgtacacgccgcagtcgtagccgttctgctgctgcggggcgtcctgcacctcctccactcggtcggcagcgccgtctccgtcgtgccgacctgttgctttgagcagatgctcaaaggacctcgccacgcgccgagccgcgtgtctgttgtggcccgcgctcgagtcaaagtgcctgaactcgcccttggcgaagagtaggagcgaccagtggctgctgtctccgcccagcaagtcgttgtcggtcactgggacgaggcagagccgcctctgcgccaggttcacgcccctcgccaggtcctggaactcgtcctcatcctcgcactggtgcagcagacacgagaccacggccgggtccatgagcagcacgtcgtccgaggccacggtctgcgtcaggaactgcaggtagaagttgacggcgttgtcgttgagccattgccgccccgagaagagcgccacgtccgactcgtacagctgcacgtcgtggtagttgagcacttgccgccgacggcgcgccgaccactcgccaagggccataccgagcgccagtcaatcgccgaggtggttggtcggccatggtgttgctgtctgccggcccaatataacgttcgttacggtatgttatttacgcgtttgcaccaatcagacgttgttttgcctcagtatcttttccacaacgtaaagcggaaatggcgtcgctcttcccgcagttcggcaacgtgttcggcgcgccgagcaccgcaggccgcgtacgtggcgcgcacccctatctctctctcccgactgcctcctctaaccgagtgtctacccgcttctcttctcttctgcgagcagaacgagctggtgtcgttcaacgccggcaagatgacggtgaagcccacggcgaacggcaagttcctggtgacgccgcagctggagaagggcaaagtgtgtctctcgcgcggagacgaccagctgctgcacttccagtgggtggaccgccagacgggcgccagccccgaggacttcatcatcttccccgacgacgcgcacttcgccaaggtggacacgggccgccccgaggaccgcgtcttcattctgcagtacaaaaactcctcgcgccgcttcttcttctggatgcaggtgagggcaattgctacagcgactgcaacttttgtgttgccggccggttaggctagtgctaaacctgcgacggcaactgcaacaacacagttgcctcgatccatgagtctccggcaatgaattgggtaggtaggatacgtgctaacgtgtctgtatctgtacctgcatctgattagaacaaggacgcgtctcgcgacgaggagctcgtgaagaaggtgaacgactgcatgaacaacgcacaggcggccgccagcagcgacggcggcggccgcagcgccggcagcaacgtgcagctggaccacaacgccatcatgcagatgctgggcgccatgggcgcgggcgaccagggacgcggcggtgccggcagcggcggccaggccgtgcagatgtcggagctgcagaatatcctgcagaacatgggcctgcccgcgggcgcccagtcggcggcctcgtcgcccgccacgtcagccgtgtcgtcctcgcaggcgtcgcagaacggcggcggcagctcggccgcggccacgacggcgtccacgcagcacgagcacgacgtgagcggcatggaggtggacgagatggacgaggacgagctgctgcgcctggccatcgaggagagcatgcgcgacggaggcagcaccaaccccaacgccggaggtaacaacaacaacagtgacgcgcagagtggcaacagacccggcggcaacagcggcagtggcaccggtggaggcaacatggacacctcgtcctaagcttgttgagagcggatgggaggcttggcttgtgcccgttgctcgggtaggtagcttgtaattcgacaacaaagtactccatttgttctgtctctgcggcttcctctccctactaactaacgccttccaccacgtgagtagtgcttcttcatgttgttgttgacactaagatttttctgacgtttttgtgtgttctgttgtgctgctgccatttgtaggcttgctgccaactgcttagctgtgtctgctgctgctttgggtttgttgacgaccacggcggacctggtattgatgaacctgtgtattgtcgtcgttcttaactgttgtagtagcttccaccacgaccccggcatcgtcagcaccagccgcgactcctgctggagcccccgcccaagctacccctgctgctgcctccgctacgcctgtaccggctgcaccagcacctgcgactgatgctgctgggacccttacaacggcagatctccagcgtgcgatggcgtcgttccagcagttcacggttagttccttgctttcgtgtttgttgtgcgatggagctgccacctcgaacactaaacaaactcattgtctgtcgtactaatactattcacagcaaccgaagccggtgtccctgaccaaacttctcagcgccgacaacgtggctagcatccttgacgacccagcttgtgttgaagcgctactactgcacctgcctgagggttcgcagaccccagcagagcttcgtgcgacggtaacctgatgaaactttcttagtggccgaactcgtattctggtgcttactctcgctcgctgcttttctttctgtcagttgagatctcctcaactgcgtcaaagcatcggatcgctggtcagcgctctgcaaaccggcaacttcaacgccgttatggccaacttcggcttggaccctgccgccggagctggcaagctcgcatttggagacggtaggcgcaataacccccgcagccgacatcaccgcatcttgacgcttgtgtgtgtgaacgatcaattaggtgtgggtgctctactcgctgcaattcaagcgtgggcagaccagcaagacacctccatgtctacgccaagcgatcagaacgaggccaacaagtaggagtaaattctacttgtatcgttttgagctatgcgtcgccttcgcattgaaagcactccaaggagaggcgagcagtaagaactaatacactcgcgtgccgccatgatcaccattacttaggatacctgtattgtacatctatctaaacgtggcgtgggtatggatggccctggaactgaagctcttctcctgtgtgggctttaagctcgctccctagcttttgtatctgcagtgtcaccgcatcgatgtggtcacggacctacagcaccagcatcaaacaacaacattagcaccagatactcgccactagcatatataatgcttcaagacgcacccaggtgacgaaggcggatggagacatcgagtcgaactctcgagtcgagggcttgaatggcggcagcgtctccgagtttgactcgggtaagttcttgctcgagggttgaggcagcgccgccaccagagagaactctgatgtagtgagccattcattcgggcgcagatccccgcgctcagcgaatccagagagggcgagcttcatgcgttggcggatcgccacgagcggagtgacccgctcccagtgctccagagccgccagaaacgcgtcagcgtcttgcagagttgaaagtcgctccagcatcgccagtttgttcgagaaggggaactgcagcactcgccagatggcctccaaccgggcgtgaagactgagagcatgaccggttagggcgttccccgccgagcgacctcctgggccgcgacttgctcgatgctgcagaaccggcggcctcttgcccttgccattgtttctcctgctgttgccactgccggtgcgccgtttgacggacgacatgctcatcgagctacgagccgagaagctggtgcgactgctgtcgacactctccacgtcgtcatcgccgtactcagtgccttcttctccctcgtctccttcttcgctgtcgtcctcttcatcaccttgatcacaaccatcttcgtcgaatctgtccttctcttcgttgttctcctcctcgtcctccgcaatcgtatcgaccccattaccagaagcggctccaggcggtagatgccacgcccaggtctgggctgtatccctacgataggctaaccgggcttccgagtgacggccgatcgcatcgacgtccagttgacctcgaggcgcaccgatgagcgactctttccgccggccatgccttgagatcggctgggacggattcacgatgatcttctgctccagcatcgacaaccacccgcgtgtaccaagtcgagagcgcctttggggtgacaatgaaaggctatctgcccctggcgtggcgaactctacccccatagtcgtggtaacgggtagagctggctcggatgcggagatcactaggcctgaggaaggacttgtggggtgttgtggctggttcccggccaccggtagtgatactgccgaggctgaagctgccattatcttcgctggcgctgtctgtgggaggcgtaactggtggatcttgcttgtcgcccgcacagctgcagctgctgtccgtgttcgcctctcattagcgataagacgctctcggatgcgggcctggagctcggcatagacttcgctgtccctttgcccacctgctttgccagcgtccaccgccctgccactctcgtcaccatcgccacttcttgacgtgtcctgggccttcttccagtaggaatgctgatcctcgagccgctgacggagctccacgggtataaacgttagacctgagcacacaaacttggagccgaagtgccccagcgtatcccagcgctgacgctcaccacatcgacgaagcgctttagcaccccgcgcgccgactgcctggtagcttggagagcgttgcatccactcgtcggccgggtccagcattcgaacgtgctccatgtcggcttcggcgctgttgacgttgaagaggccagacgccttggcattcgagctctcgcctgtagctaacaactgcagcacctgcgccacgtgagggtgtcgcgcgtacagatccccgtcgttggcgttcgtgttggcaggcgccgtattgaatccgacatcttctcgtgcgagctgtgcactggttgaaggcggcgcgagtcccccgcggcgcgtttgcatcctcagcacgcttggactgcgattaccgtcgttagctggagcgtcttggcgcgagagtggcgagggtgacgtctggttgttactgctagatctcctgcttggactgccttctgtagcacgcagagctggaagtttcgacgcttggaccactttgcgcttcctccgcttggtcgctgctgtacttcgtgctaccgatgccgtcccggcagatgtcgctcgactcgatggtctcagcagttggctgagcttgtgggaggcttgagggaaggcactttggccgggatacatggagtttttcctcttgggcgacgtcggtatatgcagcacctcccgcattgcctcatcacgcagccgatcgagcttacaccggcgctgcaagtccacgagacacagagtctgagcacgttggatgttggcagtcgagtcgaaaatgccgttcgcatccagcgccttcgtgatgcgcgcaaagtttgcgtccacatcgctggcaatttgttggatcttcctctgcatcaccagcatcacccgctcacggtcttccagcgagagcctctgcaggctgcggtcggctggctccactgagaagagcgctacacctcctcctgtgttcgcgcgagcctcaaagtccctcatcttgtggctaagcacgacgtcgggcaggtgcatcttctcatcgcttaaagccgaagcacggtggcggtccccaatttcgcccaaggttgcagccgttgtggtctccgctgctggagctgtggtacttcttctagctgctgcgcctggaggcccagagatcgccgagtccttggaattcttggtgaagatggagacgccctccttggcggcgttggcacgacgttgagctcgctcgatccgatctcgcagcttggccggtagacgaatcggctcgagcgactgagacgcgcgcgtatccacgagcaggagagaaggcgatgcatcggaggatgatctgctcactgcaatccggtcgtcgctcatgttgctgctgctggcttggaagagtgcatgacctgacacgcgagactagcgacgggaatagacgaacctaacaacgccaccatgttcgtccccactgaaaatagtccccccaagctccaacgtcaaacacgatccgttggtggtcaacccgcacgcgtacatctccaagatcactatttcaaatggctacaaaaggcaaaactgattgataactggtgtcgaatggcggagtcatatcatagacttcggaagttttcacgcgctaccagcgctgcgcagctgaaaaccccgaggaattgatctgctggtgtcgctgctgctggtggttgtgctggaaaggagcggccgggggaggagccaacacggagggtgaacgtggatggtactggggtccatgcgcgtgaccaataagcggtttcactggcagttctggggacgtgacgtagcgagagtcgtcactcacggggttctcgtgcgtactcatcgaagctcccgttggctgctgtcggtaaccatattgctgctgttgctgcgaggggaacccattgtgtgcctccagcatcgagtccactccatggctgtggtgcccatggctgtgcccatgcccgtgggagtgcgagtggccgccgctgcagccattcatcaccgtcgtctgctcagcgcctgcgctgtccattcccatcgcggcaagtacttgcggctttgaaatctgcaccgacaggaatttgtcgagccgtgcatggcgccggaagatcgttcgagcttgctggagcacttgctgttcgttcgccgaagcggagacctcgaggtgcaaggtggcgacgcacatgtctcctgcgtggtgccagatattccactgcgcaacgcgctccacaccggatactgacgcctgcacttcgtgtagcgccgcattgacgctgccttccatgtcctctggagccccttgcagtagctggcgagcagtgtcgcgcaacagaggaagcgtactgcccaaaatcaacagcgagatgagcgcggaggacgccgagtcggccacgtgccactcgtacaattggatcagtatcgacgaaatgatcacgcccacactgcccaacgtgtcggccagcacgtggaggtacacgccgtacatgttgctgttgctaccgtggtggccgtcttcggaggcgtcttcaccatgggcctggtggtgcgaattcccgtgactatgtccgtggccaccgccacaggctgaatcgccgccgtggctgtggctgtgtccgtgtacgtggtcgtggaagaagaacagacccacaaggttcacaaccagtcctgccgttgatgtgagcagcaaatggttcgtggcgacctcggggggatccagaaagcgcgacgcagcctcagtcagcagatggaacgacaccacaagcagcagcagcgagttcaagaagcccgacagaacctccacacgcccatagccgtacgtgaacttggcgtcgggcggcagttgcccaatgtaggacgccacgaggccaatcacgagtgcgccgttgtcaaatagcatgtgcccagcgtcgcccataagccccagcgagttcgtgtagagccccacacccagctccacgaacatgaaggcgacgttgaccgacaggaagatcagcatctggcgcgaggtgcgcttagaccacagcacgcccagaacgtggctcgcgctgttcgtcagtccacccttcgaatcaaacccagcgctggatcggtacgtgtccagatacacctcactatcagcacttattcctcccctccctcctcctcctcctcccaacggcgcaccccctacacgccgccatcgcttcagcagcacaaagaggatcaaaccgctcgccatcgcgctcaagacgccgcggaaccagccccgctcccaaattgcagcaacaaccgccagcgccacccccgtggtcgatgccaatagctgcgccctggcctggtctatcgacgacagcgaccggagcttcccgtcgaagaacgcggccgtaaactgagccccagcagtgaaaagcaggtagaacgcccatgtggacgtgctcatgacgcctccgtcagcgctcgcccggtcgttggcgatctgctgggcgtgggcgacgctctcgggcgtcagcaccgccagcagagcggccgtacccgctgcaatggcgatggccaggggcgacgcgtcggcgtcagcggccgtcgccctcaacgcggggctctcggccgccagctgcagccccagcgccgcccccaggagcagcagcgtgagcagcagcgccccgtactcgtccgcagagacgccggccaccagcacgtagcccagcagcagcggcagcgcgtcgttcgcgtcgccgttgcgccagcgcttgagttgctgctgcagcggctgcgcgtgttgcagcaggaaggccaacagcggcccgaagtggcgcagcgcctgcacgcccacgtacagcgctgcgagtctcctggccgcgtccaacgttgcgcgttgcggccccagcgctgggcgacgtcttgcgttgcgcgagccagcggccagccggagcgcgagctgcagcagcagcagctgcgccagcgccgaaaagtcgcgcgtcgagtgtagcagcagcgcgcgcagcaggagcagaaacagcagcgagctcgaggcggaggccgccgccgcgggcgcgaaggagccgccgccgccgtccaccgtcaggtccatcgctcaaagtgttgtggtcatcattacatacggggctagattcgacgtggagggccgttagaggggtcaaagaagtaattacggaaacttaaaatagacgtcaattttattgggtaacttcatcatacttattccaagtagtttctccgacggcggaggtagtaatttcgcaattcaagatagtcagtgattaaaagtgctgtaattgaaaaaaggcaaacgataagataacgtagcgtaccaaataatgcgtggtatggaacagtaactgatcgactcgaacttctacccgtagaacgagtcgtatagctcgtgctccaatgcagcagcactgccgtctacgccttctacatgcaggctgggacgttcgacttgcttcatgtcaataacagttcaagtgagctagagacgagctactcgcagtgctcgaccaatccagtacagattagattcccaatcgatgcctagctccttccatcctccggcaaagatgatcgcctcgccagtcttgctcgtggccacgtcttcctactatctcaatggcagctcgctgagcagggcccaggtagccatcgtttcagcgctggccgagcgacagccgtcgagcgttgcacccctgtaaccacacgaaaggcggcagatgatctgatgagatctgccgcagatctcatcaatcgcgccgattagacttaatccggccgtcacttcaacttacgaatgatcgaagtggctggctggctgcttggcatcaatcgcctccttatcctgcgccattcccgaattggcggcgaaccccacagtcgacggctccatggactcgagccactacgtcgcggccccacccacgcccaacacgggcccgcgggccgacgccaagcgccccggcacgctgcgcctggccgagcgatacgcgcaagagccgccgttccgctgccgagccaacccgctgcagcgcgcgtcgctgctgtcggtcatctcggcccactggctgcagccgctcgtgtcgctcggggcccagaaggtgctcgggaaggaggacatttgggccgttgcccccgaagactcgtgccaggagctgcacgaccgcttccgccctcactacgcgccgcacaagacggagctgctcaacctgccgcacgtggccatgggcttcctcagagccttccgccgagagatcgcgaccatcatcggcaactactgcgtctacatgacggccatggtgctgcaacccttcatcgccaaggccatcctgcagtacctggaggaccagtcgaacctcttccacatcgacaatggctacgtcttggtggcgctcatggtgggcgtctccttcgtgggcatcacgtgcctcaactacggcttcttcctctcctcgcgcgtgggcgccaacatgcgcgccatcgccatggacaccgtgtatcgcaaggcgctccacctgtcgtgcactgcgcgccaggcctacacgacgggggagatcaccacgctgatgagcgtcgactcggagcgcattttctttgcggtcatcaacggcccgtggattctcgttgcgccgctctcgttcatcgtcacgatcgtcctcatcggcgtcatgtttgacggcgtctcggccgtctgtggggctgcgctactcgtgatcgtgctgtacacgtcgctgcagctggctgagcacatcggcgccgtccagaaggagctgctccaagtcgcagaggagcgcgtgaaggttacgtccgaggcgctgcagggcattcgcgtaatgaagttctacgcctgggaggagtcgctggccacgcgcgtcgagaggatccgagcggcggagattaaattctaccgcaagttccactacctgcagatcaccaacaccatcctgctcttcctcacgccggtgtttcttggaggtctggtcatggggatctacgtggggctgaacggcactgtgactgtcacggatgcgtacaccattatcaacgtcgtgaacatcacgcggttggcagtcaacatgttccccctcgccgtcgcctcgctctcccaagcttcagtcacgtatcgacgcatggacgcatatctgggctgcgatgaagtcaagggttccagtgctcacgattccaaggcctcaacgaactgggaggcttcggccgaagctggcacgatctcagttcgcaacgcgcacttcacgtggtctccgaagtctgcaagacccgacgttgtcgtggtcagtcctgccaacagtgacgtggctggcgacgagcaaactcttgtgccgccgctgcacgaattttcacttgaaggggtgaacctcgcgatcgactccgggtctcttgtcatgatcgtgggaaccgtaggagctggcaagtcgagtctgctcagtgctctcctgggagaaatgatcttggtcgacggcgctgtcgacgtcagtgggggtctgtcgtacgtgatccaggaagcttggatccgcaatgcgaccgtgaaggacaacatcctgttcgaggaggagtttgacgctggcaagtatgcggcggtgctcgaggcgactcagttggcgctggatctccacgcgctgccggacggtgatcagactgaaatcggcgagcgaggcatcaacctgagcggcggccagaaggcgcgcgttgccatcgccagagctgtctaccactcgagctatgacatcttaattctcgacgatccgctgagtgctgtggacccgcacgtcgcccacgccattttcaatcgctgcatcatgggccttgcaagggagaagacccgcttgttggtgctcaatagccactacgaccttctcaagcacgccgacaagattgtagtggtccaagatggccgcatcgctggggacgggacttacgccgacattttggctcaatttccagagctgcacagcattggcgagacgttggacaaactggagcaggacgtgattgacgagcacaacgacgaggaagaggcggaaatggtgaggttatctgcatccacggcaactgcagtagctgtgaagaaggagcagcctctggtccccgaacagagcaagcctggaggaaactccaccggactgatcagtagcgaagatcgcgtcaaggggcgagtgagcggccaaacgtacaagtcgtacttcgacgagaccgggttcaacggagtcctcgtggtgctcacgattatcgcggcgtattttgctggacaggggatgcgagttgtggtcgactggtggcaaggtcattgggccaaggagatggagaacgaggcgtccgactcgagctactcggagctggcgtatgggctctggtactttggcttcatcgtggtatgcgcgctggtgacgatcggccgtggtcttctgatgatggaatcctgcattcgcagctccaagaacttgcacaacgaacttttccgtcgcgtgctgagtgctccagtgaatctttacttcgacgtcactccggtcgggcgaattctgaaccggttctccaacgacctcgaccaaatggactcggtcttgccccagcactaccagtcgcttttccagagtcttggagtgttcgtcggatgcttgattgtgtgtgctctggcttcgttctgggtcggggtttcgtatctgcccatgctcgtgatcttcgtcgtcacgggcgtgtacttcaagcaaacgtctcgagaagtaaagcgcctggaaggggtcacgcgctcgcccgtcttcaatctgttcggagagaccctcaacgggctgcacacgatccgcgccttcaggatgcagcacaagttcgtggagctcaacaaagcggcagtggacgacaacacttccttctacttcacgtactgggctgctggtcgctggctcgcgattcgcctcgactggttgtccgtggttgtcatcttcgtggtgaccatctacctcgtcacgtccaaaggcgaaacggactcggttgtcgccggcatctcgctctcgtactcgctgatgctgacgtcgatgatccagtgggtggttcgagcggttgacttgacggacaacgccatgacgagcgtggagaggcttctgcacttccgcaacatcccagtcgagaaggacagtgccgactgccttccgatcaacggagcggcgtggcctgcgcgcggtgccatccgcttcgacaacttgtgtctgaggtatcgccccgatctgccgctggtgcttcgaggtgtcagcatggagattcaaccaggagagaaggtgggcatctgcggccgtactggggccgggaagagctcgctcatgatcgcgctcttccgcatctgcgccttcgacagcggatccattgtcatcgacgacatggacatcgagaaggtgcgactgcacgatctccgccgcggcttggccatcatcccccaagacccagtgctctacagcggcaccctgcgcgataacctggacccgttcggcgactacactgatgacgcgatctggtccgtactgcagcaagtgcatttggcgtccacggtcacgaagtggggcaccggtttgagcttcgtcgtctctgagaagggcgacaatctgtcggtggggcagcggcagcttctgtgcatcggccgagcgctgctgaaggacagcaggatcgtggtgctggatgaagcgactgcgaacgtggacacagccaccgaccgcctcattcagtcaacgatccaggagacgttcgccgacaagacggtgctgatcatcgcgcatcgcatcaacaccatcctgcactgcaacaagatcgccgtcatggatgctggacgcgtggcggaattcggatctccttcagcgttgttgcagcagccagagtcgatctttgcgtcgcttgccagtcgcttggggcacacctaaacggtcatgaagagtagagaggaccgcttagggacaactacttaaacaagactaactttgttgttacctgcatggattccgctgcctccctttgactaggtcaggacttctttgaccacgcgctactgcttttagtcgcgttcattagtttacgcgaccagcgtggaggccgttcgcttcatcagtgccgcaaatgcagagctcggtcgcgctaagagctctgatggtggcgcgaactcggcttcacgccccgcgtccatgacagcaattttgtcgcaatgcaggatggtgttgatgcggtgcgcgatgatcaagacggtttgctccgcgaatgtctgcttgatggtcgtctgaatcaactcgtctgtggccgagtcgacgctggctgtggcctggtccagcaccacaatcttgctgttcttcagaagggcgcgtccgatgcacagcaactgccgctggccgaccgataaattgtcgccagcctcagacacctcaaagtcgagtcctgcaccccacttggtcacggtatccgcgagatgcacttgttgtagaaccgcccacatgtcggcgtccgaatacaccccgagcgggtccaggttctctcggatggagccactgaagagcacaggggcctgcgggatgatggccaggctgcgacggaggtcggcaagccgcacctgttggatatcaacaccgtcgatcgtcacactgccgctgtggaactcgcagatgcggaacagagcgatcatcagcgagctcttgccagcccccgcgcgtccgcagatgccgaccttctccccagcagcaacgctcatgctcacaccacgaagcacgagcggtagttcgggtcggtacttgagacacagattgtcgaacttgatggcaccgtgagaaggccacgcagagtcgtcgataggaacgcacgccggactgtcctcttcgacggggatcgaccggaagtgaagcaaacgctcgacgctcatcaccgcgttatccgtgctgtcgacagcgcgcacggtgttctgcatcgtggacgtgagcatgagcgagtacgtgagcgagataccggccaccaccggcgagatctgcccctttgcagctacgaggtacagcaatactacaaggatcaccaccacggagagccaatcaagccgaacagccagccacctcccagcggcacagtaggaaaagtacgccgcggtgttctcgttcaccaccttctcgttgaggtccgcgaatgtctgttgcatcttgaaagcgcggatcgtccgcagtcctgccagcgtctcgtcgaacaaattgtagacgggagaccgagagaccccttccagacgcttcacctcgcgagaagtcttgttgaagtatcgccccgtgaacacaaacaccagcagcagcgggaggtaggcaacacagatccagtaggacgacacagccgacacgaccaagctcaccgacagacatcgccacgttctggaacatcatctggtactgttaaggcaagaccgagtccatctgatcgaggtcgttggagaagcggttgagaatcctcccgatgggtgtcacgtcgaagtaaagactgattggcgcgctcagcacgcgctagaacaggtcgtcatggaggttcctcgcgctccgaacgcatgcctcggtcatgataatgcctcggccgagtgtgacgacggtgcacacgacgataaagcccaagtaccacatcccaaaggcagtccctgagtaactcgggtcgacacctctctgagtcatattcgacgcccagaaaccctgccaccagtccacgagcacgcgcatggcttgactcacagagtacaccaccaccacgagcaccagtagcaccaagatgccgttatgacccgtctcgtcaaagtatgctctgtaaatgcgaccacccactgtgccggtcgcgcggtcttcatctctgactaaacgttcagcgttgggtgatgcctccccgagcactgtcgcttcctgtgtcgaggtcatatccatggttgtcgctgagtctccttccgtcggttcaggttcgcgcttgggttctgcagtctcagagccgtgatggtggttttcgtagcgaagctctgggaagttggccaacacttcgtcgtaagttccgtccccgacgatctggaaatcgacgatcttgtccgcccgagcgagcaagtcgtaatggctgtttagcacgaggagccgtgtcttgttcgcagcaaggccaacgatgctctcctcgaagatggcgtgggccacgtgtgcatccactgcgctcagtgggccatccaagatcaagatgtcgtgccagcggtaaaacgctcgagcaatagcgactcgtgctttttggccgccactgaggttgatccctcgctcgccaatctcggtctggtccccattgggaagcgcatgaagatccagcgatagttgggaagccctcagcacgctctcgtacttcgcggcatcgaacgcagactcgaacactatgttgctcttgacgctgcagttgcgaatccacggctcctgcgagacatacgagatatcgccgtgcacttcaagctcaccctcgcgcaacgtcatttcgctcagcaacgcgttgaggaagctgctcttccccgacccgacagctccaaccaccatgaccagcgatcccggttcaatgttgaggcttaagcctttgagagcaaacgtgctgctggaatcaggcgacagcacttgggatgacaccaccgagctgctgacgtcgtcgtcatccatttctcgtgtcgaaatgggccactctgcgcgtgcatttcgcaggctaatgcaccctacgtcccccagtgactggtaacatgtagcgggcgccttgaactcgtcgctcgccagaaacttgtcgatgcggcggaagctgctgcgcgcctgcgagagcgcggtcagtgcggtggtgaactcgttgacgacggcgcggcagatgttgacaagcgccacgagcgtgaacgcgtcggtcacggaaatggcgctgtgcagcagcacgtagaggcccatcgtcgagcctgaaaggaacacgggggtgaggaaaagcaatacagagctcgagaccatgcaagcatggagtttgcgaaagagactgacctcggtcgcgcggatcttctggacgcgcttggcgacgcaccgctcccaggcgtagagcttcatgacgcgcactccctgcagcgcctcggacgtgaccttgacgcgctcgtccacgacggggagcagttggcgctggatggcggagatccgcttggcctgtcggacagagagagtgaggacgacaacgagcactgcgaggccacagagcgccgacgcggcgtcgaacagcacgttgatgagcgcgaggcagacaacgaatcccagcggagccactagcagccagggcccctgcatcatggcactgaagacgcgctcagcgtcgacgctcatgagcgtgagcacctcccccgtcgtgtactgctgcctggccgcgctggagagccgcagcatcttgtggaagatgcagctcattacgagcgagcgcatgttggagcccgctctcgacgacaggaagaaggcgaagttgcggcacgtgatggcgaccaccgagacggcggccatgagcgccacaagcgcatagccgctggacacgcggaagacgttggggcggccgtggaggtggtccaggagggcctgcgccacgtacgactgcagcgccatggcggcgatgtagacgccgtagttggcgaacaccagcagcagcgggcggcggaagactcggaggaaggtcccggccagcggcggaggattcgcgggctcgtagaacgccgagaggcggcgctgcagcgcgcgcaccgagtcggacgcgcacacaggccacaggtcggagacgctagcggccggcgggcgccgagggacacgagcggctggaaccacagcaccaggagctgcgacggcagcgacgccgagctcagcgggttggtgcgcgcagcgagcgctggagacggaggcgcggcctcgtagggcgccgagatggccatggggtgcggacagagagggacacttgcggggaacggggtcgaccggcaagtgactggaaggcagcagcagcagcagcagcagcagcagcagcatggataccaccgcttcgacggcgccgagtgttgagtgtaccatggaatggtgagtgaaggtgtttgtgctccgtcgtgcagccgagatgtcgatggtgataagttgaagtggtggcgacgggcgttgcgcttcgttcctcgcagcggtggcactgctggcagtacctctggcaggggtcgtgtctgccagtaggatactatttagttagtgccgagtgctggtagtacatgtagtcttgaggttggtcgctgctgcggaacgtacttccgccttgttgcgccttgcgacgtcctgctcgcatgtcctcctgctgccgccttaccgcatctaggagctggcgtggacgagagagctccgatgtcagcttcgttcagtttggccgcattgcatttttaccttcagttacataaagtggcttttgcatacatagatccctcttaatcactgtaaatgcctgcttaaagggccgtgtatcactacgtaaaggatcatactactgcctgattcgtatcatttcccgagtttccaggcgagaagacaagagtttggggccatgaacctgctgcagggcaagagcaaccagtacctgcgcgaggccatcctcgagggcagcgtggagaaggcgcggcgctacctgacgctcaagatcggcaaggcggacgtggcggcgctgaccgagagcggcggcttctccatgttgcactgcgcctgcctcgtgggcaacacgcagatcgccatgatgctgctgcagtacggcgccgacgtgctcgcgctcacggacgtaagtgcgggcaggccttctctagacgtacagacgctgaggctggctgactgacctctgtgctctgcgctcttgctgcctgcaggacggctactcggcgctggacctggccatctggagaggccacctgcagatcatcgagctgctgcggtcccagggctgcgttgcgcccatgaaggagcccgagagcctgaacggcaaggtcatctcccacctcgggcggaaggccaccgtcgtcttcttcgagcccagcacgagcatccgcaccagcagcctgcgcggcctctactacgaggacaagggcgaggccaagctcgtgaacctctgggcgggcacggactacaagatcgtgggctccaacccgtactacgaggagctgcgcaagttcgactaccagtacgccgagatccccgtgacactgccgcacgactacgacgccatgctgcagggcgcgctccagggcgcggccttcttcgacaacgacagcgacagcgagagcgacaacgagatcgaggagatcgtcgaggtgcgcgtgccgcccgggccgctgggcgtgctcctggacagcggcatccaggagtgcgccgtcgtgcacggcttcaccaacctgccgacgggcgagaagggccccatcgagcagcatggcgacgtgtacccgggcatgtacatcatgagcatcaacgagaccaacgcgtcgctcatgtcgctgcagcaggtcacgcagctgctgggcaagctcgcgcgcaaggagaagctcatccgcttcgccgtcttccgcccgggctcgccgcggaatcgcagcagcatggacaccgcctcggaggtgtcgaaccagcgctcgtccgtcacgtcgagcgcgtcgctgccccctcccgtgccagtagcggccaagccgccaacgcccagctctgggctcgccagcttctcgtcccgctttgccaacttggcggcctccgtcatggacaagaggccgcccacaccgcggacaagcatcacgtcggcctcagacgtaggcaccccgaaggctaccgagtgcgcgcactgcggtatgcctgccacggcgcacagctcggacgagtgcccgtaccggtctgcataacgacgtggctgcgtcggtacttctgtacgtgtaagtattgatggacgtcactttctttattgtgctctggtttccttagacgcagaactgtacacggatggactctctcctagctaaataatacgttggcgagtgcatacctcctgcgcggaggtctagagcaccatgtaaagcgtcccccagaagacgtcgggtcctggcaaagtccaggatgccagcgcgcagttttggttgaagtagtactgcttgccggtcgtctgcgactgcactgcctgccaccccagaccttggccgtcagggctctcgcccacatcctcgaacgtcgaatccacgaggtaatccacgaagctgccatcgcccatggctagagttaaattgaacagactcgtccggggtccgccgcgttgcttgaggtgctgctgggcgcgccgagccgcaggtgctgcattccgatccagcaaactgatgaagttggccgcaatcttggcagcacgttcggcgttggccttggtctcgaacgtcgtgagcgcagccatcgccgtgtgggtgctggccggggtggccgtcgtctgcttcatctcctggcgaaggtcacgcaagctcgccgagatctggttcatgcggtccagatgaacctgcaagtcctctagcttcagcgtttcctcctcagctgctggcgctggggctggagctggagcgggatcttcttcagcagcagcagcaacaactggtgtcggaggtggcccggcgcgcgaaccgttagaagctgcctggaccttcttgttggcccttgcactcgccatactctcagtgagcacgtctgccaccctcggtggtggagggggcgggggtggcgcaccggtaggccgtggtgcgggagcccgtcttgaatcccgactgcgacgaccgccagctccaacgaccagcttcttcgccactttacgaaccaccatcgggacctccatttcctcggtctccatactaagtcgcgtggagttttcaggctggacttcttctacgacgagctcctccgaatccatgctgcgtcgcgggacgattcctacatttacaggctggatctcctctatgaccagctcttcagcttcaacctcttccagctccatgctacggcgcgggactgtgcgcacgttctgaggtacaatgaactcctcgacctggactggaatgggcgcgcctgcatccgatctcggcccgaacgacctgctctccacaatcttcgagttttcatccagcgtaaaattggccgagtccgaatcgttcgacaccgtgtccaggctggcgttttcttcctccgtgagaaagctagccacttccaccttgtgcaccatcggcacatccatatccacagtcataaccgttgcctgcgataaggattgccgcactgcatcgtgtcgatggccttccgtgttgaggaagttacctgcgtcctcttccgaatacccttcctcctcctcggggtcactgtactccgccagctcggctgcttcggcctggtaatccctctcggtccgcgtcggctgctgcgtgtaagtctctttgtacttgccaacgcctagatccagctccacaggggcgggggcgaggatgctgtcaccaagaagttgcggctgcagctcctcgacgtctaatcgttcttcttcgtccccaggagaagacggtgaagtggacgccttcgacaaccgctcgcttttgcccatggacgaggacgtcggccggaactggaacatgttcggtacctgtttacgcactgccgcggatccgttgccactgctcctgtttccgtcttccattgagtcctgtgagctcgtgccagcggtggaatccgacagaaagcttcgccgagtctcgtccgaagtctttcctgctggggtatgcgaacggcccaagaacgagctgttagatgcaagtgaactgcgaacgctgccgtccgagctgacgcgggacatgtcgctctggcgcgcggatgacgcgcgtcgtggcaactctcgactctgcattttgctgctgcacttgacgcagatgcgggtcttgcgcttgcctccgggcgctgagagatcactaagccgctggtgggcggtcacgagctggtgcacactacactggctgcagatgacgtctccacagccggcgcagttgtacttcttgcgcacgagagaaaaactgcgcgtgcacaccacgcaacacacacggcgactgagcggcaccatatccctgggacctgcgtacacgagcatgtcaaggcggcgctgattgatgtggtcccgtatacatgcggaccgcagcgccgccgtgtccaccatcttcagcacaagccacgacggcagccggtctcctagatcgtttatcatcatggtcacaaactcgaggcttccgggcgctcgctcgctccacgtctgcagcgtcagcgtcttggcgcgaacagacccgtgcttcgaatcccgcgacgggagcacgtccagatccacgctcttgcccagtcggtagccgatgcggcggccgtcgccgtcctcgaaagaatccacaagctccacgtacacgtagtctcggtgcttggcgacggagggcgccagcgaccgcacgcagtgccacttgacgcacacgaagcgctcctcgggcgtgcgcggcaccagcgtgtacagcacctgtccgtccaggaactcgctcgggttgacggcgctctcgtgctcggcgaagtcggcgctggtctcggtgatgagcaggtcgctgatctcccggaacgtggcgctgatgttgcagctcccgcgcacggcggcgtccagcatggcgtcgtcggggccgctcctggcgcggtggatggtcacgccctcgcgcgcgcggctgggcgtccagcgcacgcggccgaagcccagactcaggttgtacgcgtcgtctacggacttgtcgatgaagttgacgagcgcctccacgcggtcggccgagagctcgggcaggtgctgcgccatgtcgctggtcatggacgacatgctctcgtcgcgcagactcgacggcgacgtggccgacgacgagcgcgcggacggcgagcgcagcgacagcgagcgcgtcgaggaggacgaggacaagagcatggaggcgaagccgcccccggagccgcgcgagggcgagggcgccggggacctggaggccgagcgcgcggacttctggcggccgcggtagcgctgctgcggctcgtggtcgtactgctggcgctggcgctggtgctggtagtggtgctgctgcggggggtcgtacgggtcgtcctcctcctcgtcctcccggtccaggtagggcgtgcgccggcccgtgtggcctcctccgctgcgcgtgccggcgctgcggccgcgcgcattcgggtccgtgagcgtctgccggcggcgtcggtgcaggttgagcttggcgacgctgagcgcggcgctgagggtctcggaggcggcggcgctcagggccgagacggccgagggcgccgagcccacgaccgagggcccggacgcgccgcgcggggacgtgatgaagggcgcgtactcggggcgaggcatgccgatcgatgccctgcctgcctgcgctgcgtggtgggccgccgctaggaactgaaggcgcgcggagagagcgagcccctcctgacaagacatatggcgagggctaggccatcagattgctcgggcaagagacgggcatgttaaatgtaccgacatattgtatcctacgtcagtagataggagaactctcagtacgttttcgccgcgacggacgtcgacgacgatgtgatagtcgacgccacgttaacgtcgggcagtggcggaggccattcattggtgcccgcagcgatcaagcgacgaatgcgcttgtagatgcatgcatggttcgctcgctggcttcccagtggcttcgtacagcagctgagcgaacggcgggtgggcgctcaactaagttggctttgtggtatcgctcacagcgttgaaatgtaagcaagggcttggtgcgaaaccgttggggggcactttcagcgatcatagttgtggattttacaggcgtcgactccaacagggaacatttgtttttttcgtgcaatcgatacattcgttcttcgcaataatgggccgatgaacttgaaatctggcacctacacagttatgtataagaaataggtaataagctatttttagctttatagcgcttgacactcgcgttcaatacgcggtcaagttttcatccccatacaaaggcctaatagacctttgcttacgacttggaataattgcaaggcgaccttattaccaacagctatactaacgtctagcgattaattacttgcagtacaaaaatggcagaaacttaccgcgattcggtgctgaaatgtaaggtttcacgaagctgtttcatcgcgactaccacgcgttggaagttgagaccactatcactacacgcacaagaccgataggtatcgattggtaccaaaatgcagcctcggaatctgccgttcaaagaacccaattttgggattgcatggaaaagtgccgttttaggtaggcggcgcgtgctaatatagtttcgctttcgtgccacgaaagcgatcaccgacatacagtgtggatgcccgcgaatctcatgggcatccacactgtatgtcggtgatcgacttttaggcgggccaacgttacattttgcaagcgtggtcgcaaatctactgctttagcgcaggacatacaaatttcaagtaatcggcggttgacacgtcgcgctgggcatggagccatatcgctgggagaatatattttttgcagaccgagcctcgcccgaagacttggggcccaagtacatgtccgccgccatcagcgtctatggatagtcgtcgccagctcgctgggctccgcgccgatgggcgcttgcagcctcgaaatcggccgccagcttgttcacccgccggtcggcggccttccgtgtttgtccgactcgatgatgccgagtttgctggtgactgtgaagtgcgcgcgcgcgtgctggccagagccgacgtacgtgtagagtaattcagtcagccctgacgagaatgcgctccaagagctctgggcccgaggcgtccatattggaatccttcggcacgcgtgcgcagcctctacggttgggttactctgaacaggcggtgctgctagctgtcagggttgaccagcgccaagctccctctgcggcggcggtggccggctgctccagctcgagctcgccaaggtgggcctcgattaattgaggcaacgggtgccagcagcaccgactcactcgctgagcgctggcgtcgtgcgtccgcgctcacgttcacgacgccacgccggccgagttactgccatcacttcttctcggttggcgccagttccgccctcgcctctcggcccactttgctgctctccgcgcgtcgggccacgttgcgtcggccaagtcaaaggcaaacgtgcagctgcgcgtcgtcgcggctactgccaatacaaatcgccagtctaagtaacggcccgttaacaaccaccgccgcatgagccagcaggtcgaagttgcggggcgcagctacgcgctgtccgagacgctgcgcagcgccgagctggccccgatcttcgcggacgcgtggacggcctcgcgcgtgtgggaggccagccgcttcctggcgaagcggctcgtgcgcttcgcggccgcgtcgcccgccgccttcgacgtgggcgcgggccagtcggtgctggagctgggcagcggctgcggcctcgcggggctcgtggcggccgcgctgggcgccgacgtgctgctgacggaccagcgcgaggcgctggagctgctgcagcgcaacgtggaggccaacgcggcgtccgagagcgagcgcgggcgcctgcgcgtggccgagttcgtctggggctccgactgcgcgctgccccgcagctgctaccgctacatcctcgtgtcggactgcatcaaccccatctacgggcaggagagctggcggaacctggcgcgcagcatccacaggttctcgggccccgagacggtcacgtacctggcccacgaagcccggggggaggacgaggccatgacggacttcctggccttcagcgccgacatgctgcagtgcgagcgcatcgacgagcaaggcaggatcagtctctttaggatcaggaagaaggagaaggccgtataaatagaggaaggttagctttttcacactttgatcggcctcatggcagcggcaggcagctccgtcggcatcttctgggggactgaggggcgagtggcatcggcaaagagcccaggacgagctcaaagtccttccagtacaactcgaagcacgtccgccttgcgcttgcctcaattgccgcaatccgcttcgaccagtagactacccccgtcgacccggcccagggacggagccgcgacttcgttgctggcggtgttgcacacagtgctgcgtagcatcaggggcgacatgaacaagttcatgaaaagcatgcgtgcgatggacccgccggctgacaccacggtccactttgtggggcacctcggcccacgatactattccccgggtgtggcagccgaggaccgcgagttcttcgtccgtgagcgggagatggatgcggatcgagaagcggcactagcagcggtgcgttagtagttgtttgtgcagcatgtttcaccaacacttcgcctaatacctgctagcagactgccctggcgagagagcgccactgcgcagtggtcgacaggcagttctacaactttgatcggaggaagaaacctcgtcaaactcttcttcgcagtcatcaaaacattgaggaggccactgcggccgcagaaacagctcgcatcgaccgtcatcgcagaaagattgagcacctgctgcacgtcctccaggatgaaatcgccaaggagacgcgcagagaaatcggttggtacgctttgaactgcttcgcctgttatctcgaagtttaacgctcacttactcattggtgcagagctcctggaatttagcggccccaacggaccaggatcacggcagtctaggcgtcaaatggccctgatcatcaaggctcgatacgaagctgcagaccggatcatgcgcattttggaggtgcgtgcctgcaaaaaattggcgggggctagcggtctaacgctcgcaccgagctgctgtaggagtacaaaattgtcgtgggagtaccagcggcagattatttgcttcaaaccatcgcagaggggaaagcgctcatgtcttgagaacagtcggtctggtctatctatctattgcgctctcgttgtggcgctatttcactctgccgcggcgatcgcgtgcctctcggtcgcctgattgagcagtcttcgagtttcttttggttgccttctgtcgtggagtggacgccacagtcagcaatttggtgctttaccctggtaaatatgacgcaacatacctttttcaaaactgttcgagtccgtcgaagcttggtatcttgcttggattcttcggttgcgaaactggagacgtagcaagaagaccgtacagacaatttcgatgaggccctggagctgtctcgctctgggaataaggcacgatgctcttcctcgacttgtgcctttcgatgcaactggtcctccaactctttaattcggtcctggtaatactggtcactgctcaacccaacgcaccgctacatcgatagcagtcgcggtgttagctcaccgagaccccatgaagtctgggaattcctctacatgtacccgtacctcgccagtgtcaaccacgctgagggatcccttgccgatgggtttaccaggaaagtggcgaaccagactctcagaagcctcagatgaccgcaactctgaaccttgatccagtttccccagcacttccgatatggcttgacttcgctgcacctttgtctggttcatgaaccaagcggaagtctcattactcacaaaatcgttgtggtagcaacttggttcgtctcattcggcctcatactgacctgcagtgataagacggtgtgctctagtatgcgcagtcggttctcgagggtggtcgagatttccatcacgtgtgcgaattgggtctgcgctgccaggagctgcaatataccaagcaaaatacgcactacgcagtgagtatactcacaacatatgtggaataggttttgagtattcataccgctgagtctgttgtcgcgcctgtattttgatggagcttctccccaacttcctccaacgctgccagcatcctccgtcgctatcgcatattcatttccgcgaaggtggttagctgcaacaacttacgtatgaaacattagaagtgccaactcaccaaatcatcggtcagtccctcgaacgagtcttcggcagcagccagtcgatcggccaatttactgcagcgatcctcactggcttgttgggcttcaagagcacaggcctgtagaagctgcagcgcattcttgagcgttgcttgcttctcgcgtagatcctcgaccgcagtcgacatggattcgctcgctttctggacggtagtgttttgctccttcttgacatcatcaatctcggactgaagtgccaccaccgtaccgctcagaagatgctgcgtgtcgaaatattttttcagcacgtccttcacttctgcctgtccgtgcttgacttcctgttgaagatgaccgagtcgttgctgcagtctgctgatatgcgcgtcgaattggcccgtggtctccgatgtctccgctcgcaaggaggcgtccacttggtgcactagtagctccaaatcattgccctgatagcagcccagggatacaagttccattgagattcaatcttcaaagcatgaagtagggcgagtcttactagttgtgtcacagttctttccagctgaaagctcttttccgacaccgaggagcgaacgaccgccagttcctacaacatcaacgcactagttaggagcaagacctccccatacaacataagttgactgtcaaaccttgtccagcttgtgcgtgactgagaccgccaacgtttcaacctttgtgtctatcgctgactggcatgagtgcatctcctcaacccgggcatcgagcgcgaacacttgtgccttcatctcctcaatctcctgctccgcctggtgcttgacgtcgtggagtgctgcgtcgttactctccgccaaacgcggcaggtactcctggcactggcggaactggtcttcgagcgtcgccatgcggggctcctgccgctggagctcggccgaaagtttctccatccaggtgtcgactttagctgcgtgggctgcaagttcgctctgcgcctgctgcgtcgtctgctccacgtactcctggttcagtcggaagaccttggagagcgaccccaccttctggtcgttggcgagctgggcgcactcgagctccgccagacgccgctcgaaggtttgcgtggtcaagcacgcggccgacacgcgctcgagctgcacctcgaggaaggaaatgtaggcgttccggtccgtcagcagcttcttggcgttcttttcgccgcagtgcttgagcatcgcgttgctgcgcatgtagtcatcgtagtacgagccggagccctgggccatgcttggcttgacgctcgagcagttgaagagtcctgttgaccccagccgttttgcgtcggttcgagtcgagtcgcacggatccttgatcactttgcgttcctctctctctccaagacaagacaaggcgggatacgatggcggcagcggctccgaacgaggtggaggaggtgatcaagcagctcaagagcaagcccggcttctcgtcctacatcctcatgaacaacgacggcatcgtggtcaagtacgagaacctcgagtacaaggaggccatcatgcacgcctaccacgtcctgagcctctacggacgcaccaagaaacacctgcagaagctcttcccggacccgaacgacagcgagatcgagtggctgcggctgcgcaccaagatgcacgagatgatcatcgcccagcacttgaggttcacgctcgtggtgctgcagcaggccgaggcgacggatacggcgcccgaaccgatcggccgcgccgtcgtggaggaggctgccaacggggccaaggaggaggagaagcccgtggcggcgacatgatctaatgcagagtgatggtcgtacatgttgaagttgcggtgcaacctccacgcggcttccagcaacccaagaagcattcattcatgtacatgtaggcgcattttgaagatgtgcttgattgattatatactcgtttatacctacgcactcgacgcgttgaaagctccacacagttggtgacagagtaggctgacttactctacgcgagtgacaggggccaacgggagctcgctcttcctcgagcgcttgcggaggaaaaagttcttgacgtccatgatggtgctcagcaccacaggcagcagcaacatgccgttgagcacaccgcacaccacgaccatcatgtacatgcggaagtagtacttcttgaacacgcgcgagtccgcgagtgtcagcacactcagaccgatgaccttcgtgatggtgatgccaaacacaaccgacgtcaagacctggcgaagagcatcgcgagctcgctcgtcgcccgtaccacgagccttcgcgaagaaccggacgtagtgaccgcagaactcaaccgagatgccagccgcgatgatcaggttcacaatggacagaccgttgagcatgatgtccagcggctgcatcagacccagcacgagcacgacgatgttggtcgccgtcaacgcgatcaccagcgagtagaacacgttgcccaggtacagcgtcgtgatcacgaagatagccgccagcgccagaccgatgagcttgtaggcgtcgtcgaccacagtcaggtactgctcgaagtacacgtacgtcagcgagtacacccagatgtccacaccagtcttctcgctgatccactcggccgccgcaaggttctgcttgtacgagtcgatgtagcgctgctgcgtcgggttcgacgtgcccgtcaccatgtacgaccaagccgtgatctcgtcaccgtagccactgctgttgatcttcaccgcaggcgtcgaggcgttgacggtcggaatgggctccgagtcgatactgaactggccacggtagatcgaaccaccaccgtacgagcacgacgtaccagcacttgccgtcgcgaacatactgaagagcgacatgtattgggcctcaggcacggggggaatcatcaccgacgtagcaaggcacgtgtcgtcgtccgcgcgcagagtcgtgtacgtgtcgttgccagtttcgatcgggacgtaggcgccctcggaatccacacggcaacactcgctgtcagggttgacgaagccccagaagtcatccatccacgagtaggtcgtgccggggctgatgtgggtattcgttttgtcaccgtcgtttgccaatgcgttcataatgttgggaattgagtacgtcccgcagatatccttggacttgcagaagatcgtctcgacactctcatcgttcagtgaccaagcatcggggttccgaccatagccagtctcgaccacgaagtacaccggcacacccgtggcgaggtacacatccagtgcgttgaagtactcgatcatgtacgagtctgaaggcatggcctccttctgcggcaggccctggtccagcgattccatcgagtagatagaccacaatgtccacgcgaggaacagtaacagcacgacgagcttcacaagcttgtgggttaatatcgacgcgtagacatccacgcaatagtcaaggacatccgtcagcgtgctgttctcgggcgtgacagaaggacggacatcgtccgctgctggagtcttgggctgcagcgacacaagcggctctgaggaatgctgaacagtctcaggagcggcgggtgcctgtgctgccaccgctgacgcccgcttgaaaatgatgtcgtacttgccgctcagctcgcgacgcttgtccagagtaagaacagagaggaagaacgtcatctggaagcaaaagttgatcgccacagcacagcatgccatcgcagcgaaccacagcacgacaggcatcgccgagatggaaccgaacgcaaatgccaccgactcagcagcggaggccatgaagatactggggccgatgtacgcgatactctcagacaagatgaccgttgtgatctcctcgatcgccttggggttgtgctccagaccaataaagagacttggctggtcgcgtcggagctgatcttccttctccgtcatggcgtggatgatcaagaagatgttgtcgacaccgatggccagcgacaggaagggaaccacttccatgataataagctggagcttgactccagcccacatgtagataccgatcgtcgaagccacaccgcaggcaatacttatcacaccgcagaatccggccaggatcttggacgaaatgaagaactctcgactgaacttgatgcgattaatgcccaacgaaatgtagatgagcatcaaacagtaactgagcgccacagggcccattccgttgtttgattcaacgtcgacctcatcgttgacggagatttcggcgtagaaatagacgtcgaagatcgtgttagacgcagcctccttcttcatcgtcttgatgtactcgcgctcccacttgatggcaggttcgttcttgtcgtcatcagcgtagttgtagttgaggtacgaagaaacaaacgcttccgattcgaggaacagcgtgtagttgctctcagcgccgtcagggaacccacccaggtacgtgttgtacaggttcatgggcgagccaaacgccgacaagcaggggcagtcgctcatgctcgacgggagcgaatcgccatcctccaaagcgttcttcaactcggtgcaaagcgccacgtccgacgtggtcggagagtaaaggcagttactaaagtgctccagctccaatccatacttctcgtagaactcgaagtgctccatgttgttctggaagtactgcgtgatcgagttgacggtgcagcccgtgcccgtagctttccagcaaatgtcgtccagagtaatcgtctcgtcaccgtcgtccgaagtgtacgtcacgttggctgccacagtctgcacgcggatggcctccttgatgatcgacgagcggtagatgttgccaccgtccttcgggaccataatgatctgctccgagcggtagaacgggttgaagatctcgccataatgttggcgctgctcgtacgaagtacttgacgtagaaacccacagcttgatcgggtccgtttcgatatcaatgttgtacaagccgacggcgcaaatgacgacaacgcacagcaccatcggggtgatcttcttcggtcggttacccttggagacgaacgccgcccacaaccgcagcttgtttgtcatcagatcgtccaagaagctcaagtatccgacgctgccagccatcgcgctcgccacgccatggaagtctggtgtgttagggccaactacctgcggagtgcccgagttacgctcgactgcgctgtacctcctctcacggagcatggcgacgatgaagcccacaatcagcagcacacccaccacgcctccaaagatcacgaggaagtagttgaacggggtccaatccgtcgcgggcaggttgttggcgaggtactcgttgagctccatccaagtcgcgtcgtcatcgttgtccacgacgctgccactaccggaagaggacgcggatttggcaccgtagcaagcatccgtgtacgtgcgcgtatcgtcggagctaacggcacaaagcgagccgcagacgcccacacacgacgtcatcttgttgttcatgggcgaaatgcaattggtctcgttggcgtagtcgcaatggcagaactcggtcatttgcagctcctccgaaagctgatccatagttgtcacgttgatctgctctggggacccgatgctgttgtaggcgtacttgcccatgtactccatgaggccgtagccgtcggtacagtcctggttggggttgcacagcagcgagaaggagctgtcgtcttcgcagaagtcgtagatgtcgcggatccagtccttgcccacgtagtacgttgcctcctccaccgctgggaagatctgaccttcgtgctcgtcgtcgcccgacatgatgcgcacctcgttgatgtccaggaacatgctgttgttcgggttgcacgtgaactggcagaagatgttgcgcaggttctccttgcaggccgagcacagaccggggatcatgcgcacctgcgtggacagccctgtgtactgggactcagtacagcagagcatgtcgtcgcccagggcgatggtctcattgtagagcagcggacagtccacttcgaactgctcgcggttggtgtccgaccactcggagaacttgttggagaagccggcgtcgtacgcgtcctccacggacgtcgggtagtagcggttggggatggcagcgctggtcgtggtgatgttgacgtaggccgagtcgaaggctacgcagtagcccggcgcgcggtagagcgagccgagctcctgcacgagcttggggtcctggatgcactcctccaccttggagtacgtgcagatggtgagctgcgactcgatgatggccaggttggtggcgttgtcggcgaggctccacggcacgtagctggaggcggacgacacgcccgacgacgtcgtggagctcgaggagctggcggcgcgggccacgcccagcggcagcagcagcgacgcgagggccgagacgcgcatgagggtgtcgacttgtcctggcgccggtcgattgggaagtgaggagctcgggaggagtgggggtgcaggtgcaggtcgcataggggagcacggggatccccgcgctcgagtttgagacggatcagatgtatccaggggtggcactcggcatcgccggcgttgccgtcggcttgaccgccgtgggtcacgctcgactcgccggccttgtcaatggtggagggtgtcgctgtgcgtctgcatcgcgcgtctggcggccccgtagtgccgaatggctccgttagtcgggcctgcttcagccgcgctcggctgcgcctgcgcggtccccggatcaaaatgcaccacacggttaggtaacaggcactcctgacctaacggtgaaaggagacggcggcggagggctgacagccagccgaaggtcggcttggcccacacgagtcgatgcgcgcgcgaggaaggaggcggcatccgccttgttgcatgggggctgagtcagcgctcgaggcgttggaaggaaggccaagcgtcataccgagagacgagatgattatggtcgtgggattcagggtgcgtgcagccgcttcagcgggggcaggcacagggatcgccaagacgcgaggatcaccaagacgacgcgacggatacacgcaggcaagctgggccaagtacagtgtaggtcgtggtggtatgctggatgagctctcaccatatgttccaccagagtgatggtcgttgaaggtaaaaatacatttggctacatatcgcttcctcgcgcccatgcccatgccaatgccgacgcctcgcctcgagctgccggcggcagggccgctgctgtttcctcgctacgtggacgcggacagtctccacgcggaggacgacgccgaccgagccgtccgcagccagtcggtgcttcgggtcgtgggtctgctcggagctgccaactcgtcgccaacgcccaggaagcaatgcggcagcccccgcgccgcagcgtttgccgccccctcagcgcctgagagtccgtcgctctacggatgcgacccccccggccccttcccccgaaggaagcacgcagcgtcgccacgcgtgagcaagatggccccgttgaacgccctcccgccccgagcgccctcgcccgtcggtgagttccccacggactcggtcgtctcgctcgtgtccttaatgtcgccaccgtcgggcgccacgaccatccggtccccgcgacgagcgatcctgggccagtcggacgtgcagaagatcaccaggtggctgcagtcgctctcgcgcgagagcgagagcttctcgtcctacgcgctctactgcgatatgctgttccgagagagtcgcgtgctgacgcagggcaaacccgcccccaaccgtctgcagacggcgatcgcgttccattgcctgtgcaaggccacgagtgtcttcgcgagacatgagagcattctgcttcagatctgcaagtacgtggcgatttatgagctgaggggaagtgaatactgaccgtgttgtatgtatcgtgtgttcttcaacagcgacttgggggctgccatctacatgaatcacgacccggccttgatccgcaacagcgagttcgaggcactggagttcttcacgcgcctcaccacgttctacgagcaacacaccgtgttccaccagcagaggcaagatctccagcaaggtaaaactagcacctttctttgcttatgagtggactgcagactgctgagcaacgtggagtgaatcccacacagaaatgcttagacagcaagcggcacaccagcagcgtctggacgaagagcggacccgaaacgatcagttgaaacacttgcagcagcagctccacgtcaataaactcgaccagatcagtacgaagaaagcccacaccaaagacctgagcagcaagctgcaagatattctgcagcacttccagcacgtcagcgatgacgagaaagagaaaatcgtcctcggtgcgatcgacgcattgcatgcacacgtgtcggccaccgcggtacttgcaataacggacgagatggacccagccgagaaggacaaacttatgggcagtttgtttcgggatgaaatgaaggagatcacgcagtacgtgcatgcctgaattcttggacggtagcactagggtaaactaacgcgtagtctgtccacccatgcaggcaaattgaggcacaggtgctcgtcaagtcgaatgcgcaccaaaacatgattctggagcgctcagctgcacggatcactcgcttccaggcactcattttgcatgcaattaaccccccagagagtggcgaagatccaaaagaacacggcagcgctgaagcggacgattgtttgtgtgaccacgatcgcaaagtactcgagagtatcggtgatgtggtcgatgagttgcaacgggagaagaaaagtgcgatgagcctagagcaaaagctgcaagaggctgaaaaactcgcgactgatctgcgatggaaaaacaacgtgcttgtgaacgaagcggaagagactgcgaaaacacacgagcaacaactccaagagatccgagatcagctcgcagacgctcaaaactcaaccgacgacaaagctgtccaaacagaagatggcgacgaaactcgtcgccaaaatgaaagtggcggtgggaagcgacggcgccaactggctggctcggacagcgacgacgagctaatcatgaagaatcgagccaggaacaaattcggctacggtattgctaacatcatcgaccaagcgaagattgctccgtccaaagtgcgcaagattttgctgaagcgcaaacctctgacgttgaacgagctccacagtatcattgtcggatactaccaggccaagatgttccaagacgtgcaggatgattcgtcaggcaaacctcgcgcgaacttggcgcagttcatcatggagatatacgtgctacactatggtctgaaagacctagctgtcagccagctcatctttctggatgctgccatccgcaagaacgctcgagtacgcgaaccttcacttggtctatttgtattcgcgctattgcacgaagctgacatgaattactcctgtaggaaagcgctcgtgtgcggatatttggacttctcacaggctctttggacccggaatcccatgcctgctccgttcaaggggtcgatttctttctgttggtggtcgtgatcatcttcaacggtacgtagcctcttcgtagcgaggctagctgtgcttcgtgtctcacgctaccatgtttccttcagctggtgtttacaagaaaggcaggaagcaagccgtgaccatcgcacaaaacctcaagacgtttttcggagatggaattttcgttagtccgaagtctgtgacggttaaacacgatttggtatgccagacgattgatctggcattctcgtttacacggaatgagcctgggggacccctgagccaactgaaagacgagattcgacagagatgctcagccaatcgtgggggcttggatatcgacatggtgctggagaagatcatgaattactggttcgtgctgtatgagcaacagattcaggacattcacaacatgttcacaatggtcgacacaaacggcgacggcaccttggattttcaggagttctgcgagctggtggcagttcttgagccaactatggaccgtcgtgacgcgctggcgctgtacaaccgcgcagcaggagaagataatgtcatcgacaaggacgagttcgtgcaggtcatgctagctcaccagcggggcgtcatccttgaggaattctatggcggggtgtcgaacaagaaaatcctgatgggaatcgagcagcggaagaccacgttgttgccgctaggttcgtccacggcgacgagccacgaaaaggaggaagggtccttcgcctcattgactgcagcaatggcctctgtctcaatgcccgcggaggctttggaagaggaggacgaggaacccacgagtctggacgatctcgagaagacggagagccaacgagtgcaggagaatgtgtccttccaaacgctgtctagattgtcgacgtgggccgcagaggccaagatgaagctgcgacgatcaacatccaaaactatcaaagaggagcaagaagccgtaagtgacacattccagggtgacgcgacgctcttgctgcatcaagcgctgcaaaaggccaacattagtgtagcttcgcccaacgagtagaggcgattggcatcgaagaatctgcttctgtacattatttggacaagttcccctctttcatttgtattgctggtcactccttctacttcatcaactcttgctccaactcaagatctcgaactgtcagcgtgtacttcattttcttgtcgcgcttcgagtctgcattgacgtcgtccgaattgtcgtcgtcttgagcttttgcttcgagactcaccttcaagatcatctcctcgatgatgccaggggtggattcgcgaggaacagcgtgtccacacacctggagtatcgcctgtcctgggcggagcagacccgtcttctctgctggacctgggctcgagatgaacgctcgaatgtagatcgcctcgtctttccagttgccaaacagaatgccgagtggggctttcgggaaaacgatttctttcgttgggatggacgacaaaatgtcgacgctgtcctcgttgacgggcggggcagcggatccatcgccggcctccttgatctcctcgctttcaactttgctctcatcactctgctcttgttcttgatggccacgactgatgatggagcctctatcactcttgctgtctgagcgacgctgctgctgaagcagcttgcggacggcgatatagtcctctctgcttacgaatgtgcagcgcatcggctccttcttactcgcaatttctcgcagggcctccataatctccgcaaaattaccgtagtcagggcctgtaagcggcgtatcattcacctgtagcagcacgtctcccttctccaccaaatgggtccgctgggcgtaggacggaacacgcgcgaaagctgacagcaccacatacttcctgccagtggacggcgggtcatcttcatcgtcacacgcaaacgaagacgcgtcctccatttcaatcattgggggccagtcgcgtagcttgatgacagcatccgggcttgtggcaaactgcatcgtcacagggcgcgactttaactcgcgaagaacggccaacacttcagacagcgtcttgaagcgcaagtcaacgttgttgaccttcatcaggagctgcccgattcggattttgccgctgagttctgctggacatttcgtaccgtccgatttcgctgtaaagccaaccacaatcacaccacaagtcgccagagggcgagctcgcagtcgcaacccaaatggtccctcctgtcgaaaggtaaaagtggagaattcgggctggggcttcatctgttgtcgcctgttcttcgcagggtcttccgggagcaatgagaatcgcatcgtgaatggtaggggcagcgagtccagcaagcctctcagctcctccaccgtcagcttactgcagcacagaccgttgattgccagtacactgctccccacaggaacacgcttgagatctccggttaaatggaaatcgtgatggtcatcggactcctctttcttggtcgctggcgtgtcaacatccaaaattcgtgatacgaccacatacttgttcagaacccccttcgtgaaagtgaaaggcacggtatttcgctcggtgaaggtgcactcaagctcttgtggttgaatctcgacctccttcgcaccgcgccatggactcgccgtcggtaaatcttccatgcggatgtcgaggagttgaaagatcagtggccaatactcgtccatttgcttgttcagcgtccccagaagcttaatcatgtgcttcaacagctttgtttccattgtcttggccagatactcgcggattagctccgcgaaaagtgatgtcagcatgttgtagactgcgctgaaccagctcccttggactgtgagctttaattcctggcggatttcgatcgtcattgaattgagcaccagaatcggtttgaactcacccgtctcctcgttcacaaccttcttctcagctttaaagcctagcgaaatcacacctccactgagggcagcatccgccaaccctcctccatgcaagtatggaaaatacttctgctcgaaggtccagtcaaagcccttcagtagcgcagtcaagtgcgtcgctcgaacggtgaacagctcctcgtcgactactgttcccatccgcactttcacgcgctctttcttcacacgaaaattcgacagatctagatttgaaatcgagtacttgatgtcgtcttccacacccgaaatcgtgtcaactttcaaggttggcaacacggacgtgaagaaatcgagacagtgatccttcatccggttaacgaactcttggcgcttctcgcggttctttgacatcgtggttccccactctgccagcttgtccaatttgacctcagcgatagcctttgtcacgttgtcgcaaaactgatcagggttctcaacagactgaaccaattccttcgccttcttcatcagtgtttggccgtgcgaggtctgctgcatctgcatccaatatttctcggaggcgtgaaccagcacttcggccttagacgacaacttcggtagcagttcttcagcttttagcgccaacgcgctcgggtccaaatcggtcattgagttcacgcccagcttcttgctcgccatttgctccaggcgtgcaattgtctcctgcgctttcatcaagtcgctttcgtgctgctgcattttcgctagcacctccgactgcaacgtttggtggtctagagacgccttcagggcctgaaagcgaggctgctccgcattcattttgctttccaagacctgcaaaacctgcgagagaacaagtttgttgtcttcctgcgacgaagtcagcatcgacgcagcactaccccttgaaaggagtctctgccgagccgaaccgagctcagcgctggccttctcgcgcagggtcgagtgaagattcttcacctcgtcactgttcttcaactgactcaagacagtagccgccttggcgaaaaacgcagctgagtctttgccctcaagcaggtcgctctctagcatcgccttcgcagacactgccatctccttcaagcgcgttagctctttcccgcttgcagctcttaaacgttgggtagcgtccgaaaagctggggtccagcagcgaagctagagctctcgtgtactggtctccgtacgacgcattcgtcgagataaacgaaatggcctccgcgtgctgttcacagaagatctggagctggcgatacgtctgcttcgccttgaggctgagcaccagcgcgtcgtcgcgggtgatccgtccctgaaactcgtcgtagatcctctcggcggatagtggcttgggcacctttgacagcagtcggagatcgacgcacgccacatcttttgcctggaagtagccgacgctgccgcagtccagttgcaccgcatacgagtcgttcgggctcctgtagtccgtgacggatccgagaccgaaactcgtccgaacgcgcgtctccttcgccagacggagctcgtttttctgccaaataaaggaaagacacaaacagcccaaagtcaaaagctgcacagcaaccgcttgcttcaagctggcgcctgcaactatggcggagtggagacgcaccgacagcagcttggtgcggtcgtctacagccgtttgctcccggctctcgtcagcgtcgtcgccttctttgatcagcacttggtacttctggtccggcacactacaacacacgtgtgagagacggaatgaacctcatccagcagcagcagcagcagcagaggactcgttgctccctctcacatgtagttgagcacgacgccctcctcctccatctcctcttctcctccacgcagcactagcactctcgtgtgcctcgggatttctccgcactgcagcatgcggatctccggcagcaggcagcccctctaagaacgaccaaatcaggcccgtgagtatactgaaaccgagagtagtgcagcaggattaggatggattgtgctcacccgcgcgtacagcacggcgccccccgccagcgccacctccacgtgcgtcttgcggtcgctgcagctgcgcacgcatccgggcccgaacggcgtcttgacgtcgtcccccacgcggtagcgcacggccatcgcgaagagcggcggcacctcttcgctccccatttcgcacaatcggattatggcttcaatgcggcgagcgacgtcgatctattgtgttcttttaacagtcttcgtgtgttcgtctacagatcacatacttagttcaagtcaaataaattgaaatatctactttccgttttagtttgtgattttatactctatctggcaagaaaagcgtctagcgggcccttcttcctcggcttcgctgcacccgcgctcgccatggcctcgctacgctgcgactgactgagcctcagggcgaagtggaagtcggcgtgctcggcttggggctcgcacacgaaccgccggcactcggcgcaaaagtggccgtccgccggcgcattttctgcttgggcggcgcaagttaaagttgcctcagttgcaggtgcaggcgcgggatccgaccgagcagtacagttgtccccgttatcagtgctactggaagtgccgttgctgctgctgctgctgcttggcgggccgaagaaggccgatatcttctgccgactgctcttccgagtcggcgacgccgctccgtcccggcctcgcttggcagcgaactgcttgatgtcctcctccatgcgctgctcggccgacgccgcctcgcccggagctcgcgtaaagaagctggagatggtggtcacggcctgcgagtccaggtcgtggaagttcttggcgtgcatgctcagggccgccagcgggaacacgctgtccaagtgcagccgcatcacgttcatcgccgccgcgtacagctcgtccaccgtcgtgtcctgcgcgatgcccaacttgcacgtgcgcggcctgtccccaggtttggcacgagtgaactggatcgtcagctgtgacgggaagcgcttgttctcgacgcgctcgtcctcgcagcgcatgaccatctcctcgcacagcagacgtacccagtactcgagctgctccacgcgcgccagcgccgccccggagcgctggtcgaactgcttgacgcagccgagcatcttcacctgcaccttcttctcctccaccggttcgttcccgtcgtcgccctggcagatttggtggacgtacgctgcagtttcctggcccacgtgcttggtcagctccgccagcccgcaacgctgtaggaacgtgtgcgcgctcagcttcttgaacgcgtctttggctgcttcacctgttgaggctcccccttggtcgggcactcccagcggatccaggctcacgtaaatactctccaactgcttgccgagcttaccgccaagccctcggacctttcgcatcggcaagctcttcatgagatcggcgacgaaccgaggcgcgaccacgacttgcccgttgggtttgttcagtggggacgccaacttggcgagcagcttgttgcctgcaacgccagtagaacaggtgtagccgagcttgctgtagatcgcctggcggatttctcgtgaaatcacggcgccgatgcagaggagacgctcggcttccgtcagcgggaatgccgagacgctgtcgcttgtatctctctcattgtcttcgtccttgcacgtgatgccgaacactttcgtgtcgtggttggctggatcctggcagaaatctgacgaaagcacagtctacagcagcaggcgaatcagctacaatcttcccatagaaatactagccagcaagacccactcactgtctgcgccagcctctgcgtggccatctcggtcacgtccatgaacgcttcgtcgatgctcgccttctcgatgatcggtgccatggagcccaggatggcaaagatctcgcggctcgcgacgcggtatctcctgaggatggccttctggtgcgtccggtcgaagagctgcccgggcttgcggttctcccccagcgtgtcgacatgcggctgcaagcagcgtgttgtatgagttctagtcagcctcttaccattaccatcatcatggtgcttgcagtaacttcaacgtgtggcggacgcaccaagtgaatctgcgggcactttttcttcgcgtcgtccacaaagtctcctggcgccagccgcatcgatcaacgcatcagtcagtgagcagccacggggacgcagagcgcagcgcagcgcatcctctcacctcgctccacgccgaacttgcgcgcatcgtaattgaccgccagcagactcccccactgctgcaccgccacaggctgcccgtccgggatcttgaggcgccgctgctccacctgcgcgtagaagcagtcgaggtccaggtggatgatcacccgcgttggcgtcgaggcggcgagctccatccggttgtgcgcaaatggaatgtgtggcacactccatatcgccagacgagccaatttttgagttcagaaagcgtcaatggatgagtacttaattaggacgtagtgggtatttacatgaaaacaatgtatccattcatattgataatgatcgacttggaatggctatttaatcacgacaggtacatttgtaatgcgacgcttcagaagcagctgtaccactctgagtccgtgttgcccttgatgttgcccccgttgcaccgtgtatccttcttgcacttcaggaagcagcttctcccgcgcgtccatcttggtgaaagcagactctgcagagagtgcattcacttggcatggtgcgactctaagctgagctgacggcgttaattttgctgcgctttaatcgcggatgcttttggtacgcttgctgtccgaggcactcggagcaccgacggtatcaacaccacacggcaatgccatcggtgcggccatccttacgaatctaaaatttagattctaaatgccccgacaggagtgccgcgcgagcatattccgagtcgatgcagcctcgaaccgaggtcctcggtcaccgagtcggtgcggttgctgtaggagagccgggtgtacagtatccgctcgaccagcaggatggcctcgttttcgctggcgccgacctgattcgttcgtctgcggtgatggaggtctgccggccagcgtcgtgagtaacccagcgcgagaccagccgcccgcaccaagacgccgctcatcggggcagacgcccgaggtgatcactatgtcggcgggggatccatgcatagccgcgcccaggcgccgtcgcaggcgcagtatccgcgctgcgcctctggtcgagctcttgctgatcgacggtctctttaatccgcgcttctggtcgcgggttcatgcagctccgcgccactctttcgctcgctgctcccgctgtccgaggtgtccgcggtgcagtctcagcctcatttagaaatctaccggcagtcgagcacgcgcagcgctagcgtccgactgattagggttggctgcctccactggttctcctcccttccacacatccccacatcatgcgcgtctcggccctcgcgtcgctgctgctgccgctgggcgtggcccgcgccgccagctcctcgggctccacgacgtccacggcgaccacgacgacaacgggcacgtcgtccgtctccagctacgtgccctggacgctggccgacaacgccaccaacctggccgacatcaaggcgcagctcaccatgtgcacgtactccaaggtggaggagtgcatccaggacccggcgctggtgcacgagctcggcgcgctcgtgcgcgctcctggccactgcgtggccttcgactcgtcctacgtcaacgtcaccacggccggtgtcgccatccccaaccgctactacccgacgtccgtggaggacgcgtacgacgccggcttctccaacaagttctccgagtggtcggacaccaaccgcgagcagttcgaggtggactgcccgctgctctacaacgagaccatcgcccagggcgacgacatgctctgctgtaccgagaaccagtacacggggctgtccacgcaggtgcgcatgatccccggtctgtgctcggcctgcaaggagaacctgcgcaacatcttctgtcagatgacgtgcagccccaacaacagcatgttcctggacgtcaacgaggtgcgcatcatgcccggcgacgacgagcacccggacgccgtgttccccgccgtggaggaggtcacgtactacgtgggcagcgactggatccgcgacatctacgacttctgcgaggccgacagctccttctcgctgctgtgcaaccccaatcaggactgccatgacggctacggcctcctcgagtacatgggcaagtacgccttcaacagcatcgggtctccgctccagattaacgtgacgaccatggacaaggtccccgagatcaaccaaatgaccgagttctgccactgcgacaacgtgaatgccaccaactgcatcctgccgcagaacagcaggatgacgtcctgcgtcggcacctgcggctcgctgtgtgccgtgagctcgagcgacgaccgcacgtacacagagtcctgctacggcgccagcaatgcggtcgccacgtcctcctcggccagcggaagcgtcggctccggctcggacgactcgacgtgggccgagctgaacgcgtacctggccagcaacatcccggtgacggactggacgggcctcaactacttcctcgtcatcttcggtggagccgtcgccctgctgctcattgtgggcttcattgtcgctggctgccgcgagcggagggcccgcatccccaacccgcacacgggcacgccccacatcggcccgtacacgcctgaggctcacggcgtggcgcacgcgatggagacgagcaacacgcgtctgagctatctggacgagctcatgacgaacaagctgcgcacgtgggcggtattcgtgtcgacgggcaaccggcccaagaagatgatcccgatggtgctgtgcgttgtcgctgtctgcgttgtcggcctgtacaacattgatatcgagacggacccgatcaagctgtgggtgtcctcgtccagtacctcgtaccagcagcgccagcactacggcgagatcttcaacccgttctaccgctccgagcaggtcattatggtgcccaaggacggcggcaacatctaccgctcgtcgatcatcaaggaggccatccgcgtgcagactgtggcagccaacgtgacgtacacttcggacgacggtgacgagacgattactctggacgacatttgctggaaggctacgggcacgggctgcaccgtcaactcgatcacgcagtacttccagaacaacatggagcacttcgagttctacgagaagtatgggctggagatggagcactttagtaactgcctttactctccgaccacgtcggacgtggcgctttgcaccgagttgaagaacgctctggaggatggcgactcgctcccgtcgagcatgagcgactgcccctgcttgtcagcgtttggctcgcccatgaacctgtacaacacctacctgggtggcttccctgacggcgctgaaagcaactacacgttgttcctcgactctgtggcgtttgtttcctcgtacctgaactacaactacgctgacgacgacaagaacgaacctgccatcaagtgggagcgcgagtacatcaagacgatgaaggaggaggctgcgtccaacacgatcttcgacgtctacttctatgccgaaatctccgtcaacgatgagatcgacgccgagtcgagcaacggtatgggccctgtggcgctcagttactgtttgatgatcatctacatctcgctcggtatcaaccgcatcaagttcagccgcgagtttttcatctcgtccaagatcgtggccggtttctgcggtgtcatgagcattgtgtgcggtgtggcgtcgacgatcggtatctacatgtgggctggagtcaagctccagcttattatcatggaagtggttcccttcctgtcgctggccatcggtgtcgacaacatcttcttgatcatccacgctatgacggagaaggaagaccagatgcgccgtgagcagccaagtctcttcatcggtctggagcacaaccccacggcgatcgaggagatcaccacgacgattctgtccgagagtctggcgtacatcggccccagtatcttcatggcctccgctgccgagtccgtggccttcgcgttcggttccatttcgccgatgcctgtcgtgctgtggttcgccgccatggcttgctgcgctgtggcgatcaacttctgcctccagatgaccctgttcctgtctgttcttacgctggacaagcgccgcgagctgagcggcaagtacgacattatcttcaagcgcgcctcgtacgtcaggtcgcagccgcctgccggtggcccggagactcagcagactgcccaaccccttgtctctctcgagcccaagaccccggcgcccgaagatgcccgccgctctatcacgcctgagaaccgcacgctgacggacgtcctcgactactgcgtggatgtctacgcgtcgatcctgacgtacaagattgtgaagctcgtcgtgctgctggtcttcctcttctggacgttgtggtcgatctactcgatggaatcgttggaccagggtctgccgcagaaggaggccatgccttcagactcgtacatgattgagtacttcaacgcgctggatgtgtacctcgccacgggtgtgcctgtgtacttcatcgttgaaactggctacggtcgcaacccggacacgtggtcgctgaacgacgagagcgtcgagacgctcttctgcaagtcgaaggacatctgtggaacgtactcaatccccaacatcatgaacgcgctggccaaccacggagacaagaatgtgacgcacatcagccccggcacgacctactcgtggatggatgacttctggggcttcgtcaaccctgacagcgagtgttgccgtgtggattccgagggcgcctacgtcccgatcgaaactggcaacgacacgtacacgactctgcgcgcggacgacgacacgtgccttgctacgtcggtgacgattccccccgtgcctgaggcccaatacatgtcgctcttcagtatgttcgcgacggcaagtgctggtacgtcgtgctcgtacggtggtggttcgatctaccgtggccagttcagtatcgactcggagcccattccgaccgtcaacgcctcgacgcctgcggtgaagatcaacagcagtggctacggtgacgagatcacggcttggtcgtacatggtgacgggcacgtcgaacccgacgcagcagcgctacatcgactcgtacaagcagaaccttgcggcggccgagtggatcagcgagaagactggtgtggacatctgggtgtactcgctgacgtacgtgtacttcgagcagtacctgactgtggtcgacgacgcctacaagctcatcggtctggcgctggcggctatcttcgtgatcacggcgctgtacctgggcaacgtgttctactcgctggtgatcgcgttgacggcgaccaacatcgtcgtgctcgtgctgggtctgatgcagccgctggacatcatgctcaacggtctgtccattgtgaacctgatcatcgcggccggtatcgccgtcgagttctgcggtcactacgtccggttcttcgcgaaggctcgcggtacgggcgacgagcgcgctcgcgatgctcttcgccaggtcttgacgtcggttgtgtttggcatcaccatcacgaaggtcatcggtctgagtgtgctgacactcgcggactcgcgcgtgttcaagaagtactacttccgtatgtacatgatcgtcgtgctctgcggtgtgctcaacggcatgctgctgctgcccgtgctgctcagcaccatcacagacgtcaaggacttcttcttgcgtagaggatcacggaaaaccgacctgccttcggcgcctgttactcgggtggagtaagccgacgtccaagctgtgagcaacttcgtgtatcctgcgttgaagccaatctgtacatatgaggacgccaccgatcccgtagccagcatccaagtcaagcccggacgagtgcgatggagcaatagagaagtgtgcgcgtgactacttcgtactactagtagtagtaagtagtacccagtcgttaagtaaataaaatagggaccccctgtcttccttcttactctttgtgctttggactcggcttggttggcgacttcaaggcggtgtttgcctttgctgttgaggtgagcctgcatgaccctctcaatgagagtatcacgccaacgttgtgagaggttgaaagggcttttcacatggagtctggcagcagtaagcttagccaattcagggaactctgcagccagggtatcaaactccccagctaggaaggcagccgacaactggccgatggctcggagcgcgtggaagtggtcgatcttgccggcggacttcagtagccggttgagcgttggtgaaaacacggggatgtccgagaagttgttgtgccgagtgccgcggagccacgtaaggcgcgactgctcgtgcgtacaccccctcgcatggcgctcagtgctctccgcattggggcgccagtggaggaagtgctccgacatcaagtggagcgcaggaacacgcgagccgaggccgtcgcgcacatctgcatccaggggctccatccaggcgtcgagcagtaccatcttcttgaaccgcgcgtcttggtgagcagcgctgagtgccgtcgccgcaccgaacgagtgtccagcaacgctcacgttggcgaggttgcagtggccgaagacgctgcccgatgcggcggcatcttgcttgatggcgtccagaactgcgcgcacttcgctcacacgctgctgcagttgtccattgcggaagcggaagcctgctccgtcgacgtcgtcccgaacctccggcgtgatctgctggtagtaatcgatgcggccagcctccgggctgcacacgcacgcggagccgtcgcagtggttgagaaccaccacgacgtgtccgtggcttgcgagctgctggttcacgtacgagtagagctcgagcgagctcgcgaggccgtggctgaagatcaggacaggccagccgtccgcggaggacggagctgaggctaccggagcatcttgaagcgccgccagctgcgcgttgctcatgttgctgaagagccacgccggcatcttggcgaagacgcccagtccggtcatgaggtggcgcccgtggtgcaggtatgggcaggcatgccgaaaatacgatatatatctattgtttgccggacataataataaatattgcattgcatccgagtagcagactaaataaataacgcaagacatagtgttgacagtaaattattgcaatcatgttacgactgtacctacttacaggcactgctccacggtcgcaacatcccagtacgagctgttgatcttgaggaacaagatcatctctagcatcgtgggggagaggcggtggcgctcatggcgcagcacagcgcgcgcaatgctgaagagcctctcaaccatgtttgaggtaggaggaatcgcattaagcagctcgtacgtggccggcgcagcagctaccttgcgtcgcttgagcgcacgcacagcgaacccttccttgtccgccggcgtgcagtccacgccttccacatgggcctgcgtgcgcttgaacggctccagcgcagcgacttcgtcgtccgtcagcagggccgcctggtcgtccagcaccttgacgaccgcctgctcgaagacggcggagtggactatatccgcgtcggtggctatgcataaataaaaacatataaaacgcagtagttaagtagaaataccatcagacgcagagtgagcgatgatccttaccgagatacttcgcgaacgaggggtggctcttgaggagctcgtcgaataggacatgagcgtccagcagcgtaaggccgtcgccctgcaggtgcttggacacggactcgacgtcccggaggcttgccagcaaagtctccagcttgcggtgggccgagcgtgacggaaggaagtccggagctcctcgtcgtccgccgaaatgaacggacggagccgaaaatagcgcttgagcattgaaaaggtcgacgaccagcgcgtgtcctgtctgaggacagcggccaatggggtcttggcactaatttcgaacaaaacccaaaaacaaagaccaatttagtaccaatacaaaaaccaaataaaacagcaaacagagtacttaccgcaacttggctgcttgctttaaagtccgcaacttacgcataagctgctggacctcttcgaggacgctgccgtggggctccaagtagtctcgcaccgccaagttcaggcggtggctggcacagccgattagcggcacaccgagtaggttcgccagccgcttgtttactccgcagttgtcaccaaccaggaatagacatccggagatagacttaccaaaaaagggtaggaaccttttaaccgccgtcagatggccgtcagcgctcagccggtcgtcaggttcatccatgacgggcgctaacgacagcagcgggtactggaggcctgtcgccgtctcaaagcagccatacactgccatgtagtgctccgtgccgtgggtccacccatcaaggaccagaccaaaacgctcgggcgtggcgtcgccgatcatcgtctccacggccttggtcacggcctccatgatggcggtcagcgtctccacggagatgggatttagcttcgtgtatctacatagcatacggcattagcacacatgtatatcaccaaaatagatatgaaaatacgtactgtcgcgtttccttggactcgcaaaaaagccagcggtagattacccgtgacgacccagcgcagccacgcgtagcggttcgaggccttctgggtgacccacggcagtggggtccccgtcgcagcgacactagcgtcgcgcatgtcgctctcgtagttggggtgcgccgcccgcacgtgcgacaccaagttgctgtagcctgacttgggcgcgtgcttgcggcgcttagcgcaggtcttgcaggcatagtagcccgtcgtctctccctcctcgtccaggcagggcttgaagtagaaggcagcaatctgcctgggcgagaagataggcctcggagcggggccagcgaggagattgtcggtcatggtgctaacgtcgagtcgtgatgcgcgtgctgggtggtgcttgtttgaaagtgagggctaacggcaaagttacgctggtagagcgcgatgtttgaccacaactaatggttggagcaggatgagcagaagtaaaataccgaattttagaactcggctacataaatttcggataaaacaaacggcgatgccctaaataaagtattgaatccgaaaatactgttatattttcgggcaatattatttttcgggatgcctgggcctacagattgaacatgttagcgctatcgtctcacttaaaaatacttactgacgacactggactgctcgcattcttgcgttgccccctctccttctctcgctctggtgatcgcaatgtttggaccacttcccgtctacgttaacaaacctgagttgcgggtctcaatggaaaataaggagattttcactgtcattctgcctatgttcgtcttggtgatcgcttcttctaagcgcaaaggcagagggatgcgagttggacgcgagcggatctagtggggctcgcatgctcagcgtcttttgctgaaaaaccgacattgtttactacgcgctaacttgtatcaagcgcccagtatgtaaaacaatccttgcatttttgcaaagatctatggtggtttttgagtgctattgctgtcgcgtgattcggttctctaatcagatagtaaatctgtcgaagttttggctaatttagactccaaagtcttatttatttcgactgatctcctaattagattcccatatctattttagactaggaattatcagggcgataagcaagtaggtccatgtgctttatccgattcgcaacagatttgtttgtaaataaggcggaatgcagcggagctgccgtagctttagcgtcagaggaagacataacagactcacagcttaagatagcccgttctaataccagaacgtacgagtccgttcactttacggactccaagagtcaacccttattgtgggtttcaaatattttaccgcccgatttgacgtgttatctcggagtccgatttatataacgtataataccgaatagtatgccctaaagtattattgtcgctttcaaggattttgcgcactctatccgacttataactcgccttcgcggtgtcacaaatcgttgtgcattgcggataaatcgttgctcaaagcgcgaattagctgtcatggccacaagttacctcgtcaaattgctggtgtaagccatagaaacggggagatttgttggccgctgtgtccaagaaacgctgaagtacttgacgcttctagactagagatatttccatagtacggttcatagcgcaggcctcccctgttgctgcatacaaatgctgctttgaaaagctagctagcacgcaacttgcagcttagcgagttgcgaaaacgaatggcggatggttcaaccgccattcgttgttttccatcgatagctcgttgcgctttctggaaattggcaggcaggattctgctaacatgcaagtcactcattggctaaatgatgctgctttcagccaataggaatcctaaatgtgtatggaccacccgtcgtggtggtcgtaaatgtatgtagccattggtgtaccttacaccaaggtcgaggaagtgttcaaacctctaacagacatcgcatctgttagagtaacaagtgactgtagccacttgtgcgtgtatcctacatcattactaggcctttttatcgggaccgcgcaaaacacagacaaaatttccagactatgtaaaatgcaatcattgattgcaaaccaaagtgtgcataatcttcgctattctacccagcgatatgcaaacggtcctgcctagcgttacatcggcattcctcaaagcgactcagtaagcggtccagcgtcttcaagcagttctcaaacgtgtctccaccgaaacaaattgccgtcgacaaaggacctgcggtcgaagaccggcaccagcgtcgattcgtcgggttcgttagtcgaaaacatgtccgcctcaggactgttgacaagttgaagtactgggtcagttgcaattgagtcttcgtgtgccgcatcaaagttagtgtggggcgttttgctgttagtgaaatttactagacactaactcactgttagctgtacgtttgctgactgttagttgacgagttagtagcaagagaataatcatgatatatattaaccttaacccccccgcactcgcggggtttttcgggtcctggctgcggccaatatactacttgttaaagctgtatacaacttgttaaggagatgcgtatttggtttaagtattgcctgctataattacgatgttctttcctgaacagctcgaaagttggtgattgttgttgcactgccatgcacatacatgttgtcaaatccacctacggtggcccttgcccagccgacagggggtatatcctacatcattactaggcctttttatcgggaccgcgcaaaacacagacaaaatttccagactatgtaaaatgcaatcattgattgcaaaccaaagtgtgcataatcttcgctattctacccagcgatatgcaaacggtcctgcctagctcacagccaccttgtccgatgacggagccagcgctgtcacatcgtcctgacgctcaccctcttcctcgtcgcggactgtgtcatcttcatagttgctttcttctcctggtctacctaccagcggtgagccatgttccgcttcacgcaccagttcctacgaatgtctagttacggaatgttcttctctgtatcgttggcaagctgaagcaccacatcaacctgtcagacgtaactgcggactgtaacgaatgttcgctatcgaacgcaccaccgcgcggttacagcacattgaggaagctctgagcattattttctacagcgcagacgatgagagcaactaaccatgtgagcgcaattctttccaagtgcgcttacccacagctcggcaacgcgttcatctccagagtataccatgttgtatatacaacggaagtgatggtaaacacgaagtacaataagtgatgtttgacttagcgaaaaaaaatgcaagtatcaacaactgagcagagtcctggtatgttcatacagtgtacaatatacaataagaagactgtgtggataatgcctcatgaatgtatagactgtgtgattgaaatgttttcgtgtgattatgtagagcccgacacctatttggcaccgctgacgctactcgctagcaccgacccgagaatggtgccctggggcgagcacaggcgaccatggccttccctccagccttcttacgccctttcgcatacaggtagcagcgtccaccgacaggtggtcagcttgctcaacgcttctccggttcgtgtgcctgccaacctcatctgttgacccgaggttcagccagtagtgcctggaacgcttcaagcttggcccacagcgacaacggcacggcgaagagcacggatagagcaccacaagaccccgggtctagtatccagtatccggtccggcgctgacgaagctagctatatgtattgtggctttcatccgttttggcaaatcgggtggtccaagatccgatatatcgggcccgatttgctggagggctccgatttagcaggaagggctgagggaagcaaactatatctggcccgatttgcgtctgggggctgcgccagccgcagcctgcgagttgcgaagcaggggccagaaatgccgcttttcaccggcaaaaggaaccgtctcgaaaacatgtatggggccctctcagataggcgtggcacggagttgtagcggccgtggatgttcacacaggtgatttagatggccatagtgctatgaattggctatatacagtgtactattgtccccaatgtcttgcagttctaatgcgtcatgagaggtggggaggtatgcccaacttggaatgcctcccctttgagccttatgctactaactcaggtcagatatagctaaattggactaaccgatcatgtgggagctccattttatataaatcggactccgagataacacgtcaaatagggaggcaaaatagttgaaaaccacaatacaccataagtcacttcataacatgatgatatcatacatgcggcacggaatgcacgtaccaatgttccacgccacctctcaacgctcagcgcgtctaaacacgtcgtgcgtctgtccccacttgagtaagcctggcagcaatgctttgccagcgccggagatgtagtagtagtcttcctcatgcaccccgcggcggaagacagatgctggaagtggcgtggaagttgatgttgcatgcacagaggctctgaaaaaaaacccgccaccagttagttaccaacagtatttgtgtggtgctctagagcaaacacaccggcatcacacggctgcactattaccttcagtcgtacatgtccccctataggtctcgcgtcacgccgacggctcccctttttacccacggactcatagttgataaccccgccagaaatcgtatctgcgtatatgtacaccacaacacacaccataacatgttgtatatcgtacatgtggcagagtaatgtacctaccaatgttcagcccggacacccaagctttcagcgagctgttagccttcttgcgtgaccaccgggtggctcttgtccagcggagaggtaagagcaggaaaatcatgctgaccgggcgacgggcactagcgctgcgatgcctcgagtctgtcgctctatcagctcggcttcacctataacgtttctcagtcagtcacctgccagacatacgcggcgcttacggcaagccccccccctgtcggcacgcacctgttgttatctttccagacgcacttggaacgcttgtcttttcgctacgagcctcgcggcgtcgacgtttgctctcagtttctttttctcgactgaacggaggggggcgttttgccgccactaatttgcagtctggtcgcaaatcgcagcaatcaatcagcgcctcccgctggggttggctttgtaatttttggtagttttctgctaatattttcacctacacatgtgcacaccatgcataattcggcgagatgtactttttcataccatgtagtcatatacaacgtatgagtgcggggggggggggggggttaaggctgattgcagttaatgtctttcttacctactgaagagatctaaacactctgcgtctgcgtccttgagacccgtcttctagcgaaatatattcgggctagggcgaattcagctctgcgtcttaaaactcgtcgatcatctcgatcggggtgtgacgggccaggttccaggtcggtctttcccaccttacccattttatcaggtacagtcactgcatatcaacagtcttacgtgcgtagatgctttcaacaacaaatacagcaccgccatcgctgctaatagaggatctcgccacactatcagttctgtccgcacgagttggtcctaaaaataaaacacaacataacggatgggactatccgttctagtcaagtaactacggctctggcgctgcactggcatctagagtagactcggcagcatctaatgcgacagtattgtgaattccggtcaaaattttcaaatcgcggcggtttggagaccccgctccaatcgccaattacaaaattcaagtcatttgcccaatctccgggcccaaaccatatggtccaagtgcccgcatgtcaaggccaattcgtacttaaacggtagcctataaccaatgggtgcctgccacaagggtcataaggacctaacatatttaccgcagatatgcgggtggatatgtcgacatatagcctagttgcacccgccacaacatgcttatagacaacaactccgtccgattacaaatgcccaagtaccacctctattcgccctacagcgtcactttgctccggacattcctatggctagatctttctgcagtttatctcatcatgctcatttacgattcagcgctcttctacccacgctgccgcggtgatggagctccagaatgatacgtgtgacgctctgtgtgtgctgtgcgaggcctacgtgagctacaacaaggacctgggcgctgatcgacgcgtgattcacaagcggctggtggaagaagatatatgacagcctgtcattcttcacaagaatgatggtcgacatattcaatacaaagtcgtagtaagtcgttaggatgggtacacggcataaccgccagtttatcgagacgattttccggtctcacgagatttatgttagcttatgctgagtatatctgctgcatttactccggatccttatgacccttttggcaggcacccaatcctagtggccccggagattggccggagatttggctcgggcggttcaacaaaccgcccatggaaattttgaacagaacacacaataccgttgacttgggacaatgtgggccacaatatcgaatcaaaagcgtcttatctcttaaaatatagaaaaccagaaggatcggagcggcgtagataaagtttgaagtgtaaaaatctttagtaatttccatttttgtgcaaaaattagtgatgctcgttcggcaaatgcatgttagcaaaatttactagacactaactaactgttatttacacgtacagctgactctacagttagtgtatagggagtgcgctaatcaatctgactctacagttagtgtatagggagtacgctaatcaaacttcgttcgtgtcgactgcggttgtcctggcacttgtagtgcttgctcggtcgcacttcgacgtgagttgtcggctcgtgcttcggcttccttcattcgttccgcaaaggctcgccagccaaccttaggttgcacgaagccccagagggcattgtcgagtgtgcgctgataaatcatcggcgcatttttgagcccgaagggcattcgaagccattcgaagtcaaacgaatgccgaaattttgcgcgcacgaagtgtcatcatcactgcccagaagccacttgcagcatcaagagaacaaaccagagatacgcctccagatccgtgagcaaatcgtcgacaagtggcatcgagtactcgagaatcatcgtcactgcgttgacaagcttgtaatcgatacaaagcctgatgtcaatgccgtttttcttaagcacaatgactatgggcgatgcccacgggctgtcggagaacgccacaagtccggctttgagcaaccccttcaatagctcatagagcttcttgagcagtaggagcgggatgcggcgcgcttgttgcttgattggcgcgtggccgccgacatcgatgtcgcacaccaccccgtaggctggcggaggcagggcatttccgctcgaaatcatgattttcgcgtgattcttgagcacgttgatcaagttgtcttgccgctcggccgacaattcgggatttttgacgttcaacgctgagtagtcgagcttggtctccgaaagctccgtcaagtcgggcaaaattgccaactcgtgggcgtagccttcaagttcaaggtcggctgccacatgcacgaacgagttgtcgtcacccctgttgtcagcctcgtcgccttctgtagtcaggacccgcatcaccgagataaatgtatgctcgagaatgtccaatggatctgcctcgctcggtgactcgggtactccagttggggttgacggtgtcggggctgctgtcgccaccgattcgtcgggcacttcttcttcagggtcttcatcgctagtatgtggctggttcatcgctgtccgactcgggttcttaccgttaggcccggaaacttcggtagtcaccatagtctcctcttgaactgctgcagacgccaccgtatcggattttggggactctgtagctggatccgtaccaactggcacgccgtcagccacgctggccaggtcgtcgcagcgagtagcacggttcgacctgttcgccggcggtcgcagtatgtgtttgggcaccgggtagcttgggcgctccactgcagacggctggctggccagccactggtggtaaagttcgcattctcgcttgaagagcgtgtcatcacgtaccgcctcgtacgttaggacctgccattcggtgtatttcctcgagctgagccaaacgtagcctggggttcttggtagcgcaccaacggggacccaagtcacaattggcagatgagtccggctgatcaccaagtcgtcggtgatgtggtgtagtgccccgcgaagaagtgggcacgccgggcgctggaggaaaaaggcgccgagatggatgtcggcagacgcgagtgatggacctcgacgcggctgatgaaacgcgacgcggattgatgggcgcgacgcagggccgagctcgacgggaacgtcggcgcgggtgatgggccgtgagacacggtgccagaatccagtgcgacgcgtaatcatccgacgggtcaaccagcgcgcccgtttccccaaaacccgtcaaccctaaacccagtcgagaaatcccgtcgagaaatcccgtcgagaaaccccgttgaggaaccccgtcgagcccaagtcgtgattacgttacgcaaatcaggttgaagaacggcagtgcaagcacgaaagacgcagggataggcgtagggtggtaggcttagcaagcagtagtacggagtagccagcagcaaggacatatgatagggtaaggactcagtcccgaaatttctctgaaccacaatgacctcccgtcttctccgaggttccaggggaaccaccaagcgccggcaagtagagccgcctcgatatcgcgccccccccccgtcgtttgctggttcgggtgcccatcccccacagaaccgtgctggaacaaaggcacgttaaacgtataccgtataggtgggcgcccgataacacgctgcctaggcgaagggccgcactggcctgataaccgccgtgcacaagaccccccgtgtaggcccgataacgctacacaagccccaggaaacgccggcccgataacgccgcacgcccaaggctcgacgctttacgacaaggaacaagcgtcaacacaagaacccccaactccgaagcctgcgaagacttgggcctgtatttcgaagatacgctactccaaccaccgggaataatttgctcggcgcgaccgctatccagtcgcgccgagtttgtgcgagatcgcattcgcgagatttctgcgatggcgctactccacaagcttacggtcgctaacggagactcgtccaggattttgggtgtcggaaccgttctccaacgtgttaccttacccaacggtgatgaacgtgagatcgtgatcgaagacgcgctggacgtgctgggcatgaacaagaatttgctttcggtgccgcagatcaacaagtcgggccggttccaagtggtgttcgacggcaccaggatgcacattgcgctgaaaaagtcgaagcaaattgttgccgtcaccgaccttaacgatggactctactggctccgaacgtcagcgcgaactctgtgtcttcggtgtcggtaaatggtgtcgactaacacgcgcgcatgggacatgccccacatgatgttctgcgaaaaatggtgtcaacgaagatgatcactgacgcgagtctgcctgaaacgtcgaagaattccggggtgtgcggcggctgtcaacaaggaaaaatggtatggtattgacatgcaacctaccgttcggtacgcgcaccaaaccaacggcactgcagaacgcgcaaaccatactatcgtgaccatcggacgcagcatgcttcatcatgctggattggacaagtgcttctgggccgaggtggcgatggctgcgatttacatcaagaaccgattgccgtccccgaaggtcgctggaaaaactccgttcgaggtcgtgtacaaatcgaagccaagtgtcaagcacatgcggattttcgggtgcacagcgtacgtcttgacgccgaaagaaaagcgacgcaaatgggacccgaaagctcgtgaaggaattttcatgggctatgaagagcggtcgaaggcctatcgggtgtaggacatcgaggcggggaagattgggatatctcgcgatgtcactttcgacgagacccgttttggccctgcagtttactcggacgatgaagtcgacgatacggtggagtactttgatgatctggaccttagcgatgccgtccccgaaatcaaacaggctggaaaacgcaaacttcgtaccgaccctgaagtgcgcgaaaaggttcgacgtccccggcgtggtgcgggtctggatgaagcaagtgcaccggacgacactgcgcaatcggaccgtgaatcagctcacagcggcgatgaagactcagcaccatcgatgttttggcgtgcgagtgcaaatgcggttgaagcgacggatgccgcagaaccagctacgtttcaggatgcggtcaatggtcccgaccaagtccactggcgaaaggcaattcgcgcggagttgaagtcgatgcgtcttcgcggggtgtttcgcgcggcaaaattgcccactggtcaacgtgctgttggaacgaaatgggtcttcaaaattaaacgcaacgccgatggttctgtcgaaaaatacaaggctcgcttggtcgcgaagggcttcgggcagaaagatggcatcgactacacggaaacgttttcgcccgttgtgaagtacgtcacgctacgaatggtaatcgctatcgcgttcttccttggatggccgctggatcagctcgacgtggtgactgcgttcctgtatggacttgtgaaggagaaggtattttgttcggtacctgaaggtgttgagctagatgatgacttcgactgcatcgagttgctgaaggcaatttacgggctcaagcaggcttcgcgagtatggaacgagaatttcgacgagtatgttcgctccatcggatttcaagtttcggccaatgatccgtgcctttacatcaaggttgccgacggacaatgggtgctactgctggtttatgtggacggcgtgctggtgaccggaagctccaccgacatggttgccgacgtcaagcgccatctaaagtcgcggtttgagatgaccgacagtggcaagtgcaaatatattctcggcatcgaagtggtcgaacacgcggacagcagtgtgactttgtgccagcgacgctacatcgacgatattttgaagcgttttggtatggacaagtgcaagccagctgcaagtccagtcgacctaagtaccaagttggttgcgagtgatgcctcggcaaaattggacgcaccttttcgtgaagcagtcggcgcactcatgcacttgatgacttcgactcgcccggatatcgccttcgctgtcggctacgtttcgcgcttcatggaaaacccgcaagttgagcactggactgcggtcaagcgtatttttcgctaccttcaaggcaccacgtcgcacggaattcgtttttcgcccggaaaggatgttggattctgcggctaccctgatgcggactgggccggtgacgtcagtgatcgcaagtcttcttcgggatacctctttcaagccatcgggggaccgatttcgtggggttccaaaaagcagtcaagtgtgtcgctgtctacgagtgaagctgagtacattgctctaagcctggctattcaagaaggaaagtgggtgcaccgacttctgtgcgagattttggtggcatccggcgtggcgactccgggtttgaagatcttcgaggacaatcagtcgtgcttcaagatgaccaagaatccggtgaatcatggccgcgcgaagcacatcgacatcaagtaccatcacatccgcgatgaagtcaagcgcggtgaagtgatcgtcgagtaccgtgaaactgcgaccatgttggcggacatcttgaccaaggctctctctggacctcgccacaaggaacttaccgccgcacttggggttcacgagtgttcggattgagggggcgtgttgcaggtaaccggttttactggttaagcccaatccgacgacacgtgattactccgcaattactctgtgattattctatgattagggtaacttgattagacgagctggatgattggatgaccatgattggatgagcagattgattagatgaacggcagcattaacctttcaaaattaagtctcacttccaaacattccatcttcttaacaagtgttcaacaacttcacggccaagtccgctcgacctttttcagagtcttgctcaatgactccatgccaagcactcaccaagagcgacaccccatgctctcgcaatgctcttaaaaccgaatactgtgctcagcacgacaaggatgctaagattagaatgtaccgcaaggagctatcaaagatgcacgagcgcgttcgtcgatatttggagatcactaacgaactcaacgataagctctcgatcatccaaaaagttgatttctacaagtctgaattgatgaagaacggaggccatgatagaccatacagaggaatcatagatagctcgttctacaaggccgagattgaagatttatttggcatgaacgcttctgctgctcatgatgagtatgatagactgcttgcgttacggaatcaattggtccatctgatggaaggtatggatcttggacacgaagctcggacgaagcggagggagggacgtcgcagacggcgggaccggagcgaaggcacttgaggggtagaatgaagattcgaaagtgattgaattgttggagcttacaccctactgttatagacacgcgaccctgcgtcctatcacctagtgcatctaatcaaccatcactcaccggtgttcatccaatcatcctactcgtctaatcatcggtggcgtaaacaacttaccgtaatcaccataatcaacgtgggttcggattggaccggttcgggttaaccggttaatgggtacaactggtacacagtacccaagaccagcaaccctcaatacgccccctcaatgcgaagtcccacgaatgccgagagccaccgtcagatccgtgtggcgtggtcccgcaagcgccttcgtcatgatgtccgctagcatcacagaagtctcgcagtactggagcttgacttcgccgcgcttgacttcatcgcggatgtggtggtacttgatgtcgatgtgcttggcgcgaccgtggttcactgggttcttcgtcatcttgatgcacgactggttgtcttcgcggatcatgagttcgggtccagtctcattagcggccgccagaatctcgcatagcaggcgatgaatccacttgccttcttggatagccagactgagcgcgatgtactccgcttcattgcttcttgcttccccagctcacaggcgcactcatgagcatgaacgtgtagcctgaagtggacttgcggtcggcgaggtcgccggcccagtcagcgtccgagtagccacgaaagtcgatcttgtcgcccggcttgaagcagatcccatgcgtcttggtgccttgcaggtagcgaaagatacgcttgaccgcaacccagtgttcctcttgggggttctccatgaagcgcgatacatagccaacggcgtacgcgatgtctgggcgcgtggcggtcatcaggtgcatcagagcaccaacagcttcgcgaaacggagcgttcaccttggtcgccgcgtctcttggaaccagtcgagtgctcatgtccaccggactcaccacggccttgcactcgtccatggcgaagcgcttcaggatgtcgtccacgtatcgccgctggcacatggtcacgctgccgtccgggccgtccaccaactcgatcccaagaacaaacgcgcacttgccgctgtcggtcatctcgaagcgcgtcttcaggtcggtcttcgtgcgtgcgatcagctcgggcgaactcccggtaatcagtacgtcatccacgtacaccagtacaagcacgcagtgaccgtccaccaccttgatgtagaggcacggatcgaaggccgacacttggaagccgatggagcacacgaactcgtcgaaggtctcgttccacactcgcgaagcttgcttgagaccgtagatggccttcaccagttccaggcagtcgaagtcaccatccagttcgacgccttccggaaccacgcagaagaccacctccttcattatcccgtacaggaatgctgtcaccacgtcgagttggtcgaggggccagccaaaatacttagcaatcgcgatcaccatgcgcagcgtcacatacttgaccacgggcgagaacgtctcggtgtagtcaatgccgtacttctgcttgaagcccttggccacgaggcgcgccttgtacttctcgatcgagccgtccgctttgcgcttgatcttgaacacccacttggtatcgatggcgcgttgtccgttaggcaacttggcagctcgaaacacaccacgcagtcgcatcgacttgagctccgcgcggatcgctttgcgccagtgcacttgatcaggaccgttcacagcctcttggaacgtcgtcggctccgatagatcggctgctgcttccacagcgttggcactggcacgccaaaacactggaggcgtcgagtcgtcgtcttcatcttggtccccagacttttcttcttcgtcggggtcggctcggcgcgaggaggatacgtccggcgcacttgcttcttctaagccagctcggtggcgaacggggcgcgatcttctggcagtgttgtcgtcgccactcggtcggtacttgcgcttccccgcctgcttgaagctcgtttggcgcggtccatcgttgtcgtccaggtccagcgcgtccaagtccagcacagcatcatcgacgtcttcatccgaagtatgcgtcgaaagtccaaaggtcgactcatcgaagttgacatcgcgactgataaccacctgccccgcctcgatgtcataactcgnnnnnnnnnnnnnnnnnnnnnnnnnnnnnnnnnnnnnnnnnnnnnnnnnnnnnnnnnnnnnnnnnnnnnnnnnnnnnnnnnnnnnnnnnnnnnnnnnnnntgaaaattcgaaagtgattgaattgttggagcttacaccctactgttatagacacgcgaccctgcgtcctatcacctagtgcatctaatcaaccatcactcaccggtgttcgtccaatcatcctactcgtctaatcatcggtggcataaacaacttaccgtaatcaccataatcaacgtggattcggattggaccggttcgggttaaccggttaatgggtacaactggtacacagtacccaagaccagcaaccctcaatacgccccctcaatgcgaagtcccacgaatgccgagagccaccgtcagatccgtgtggcgtggtcccgcaagcgccttcgtcatgatgtccgctagcatcacagaagtctcgcagtactggagcttgacttcgccgcgcttgacttcatcgcggatgtggtggtacttgatgtcgatgtgcttggcgcgaccgtggttcactgggttcttcgtcatcttgatgcacgactggttgtcttcgcggatcatgagttcgggtccagtctcattagcggccgccagaatctcgcatagcaggcgatgaatccacttgccttcttggatagccagactgagcgcgatgtactccgcttcattgcttcttgcttccccagctcacaggcgcactcatgatcatgaacgtgtagcctgaagtggacttgcggtcggcgaggtcgccggcccagtccgcgtccgagtagccacgaaagtcgatcttgtcgcccggcttgaagcagatcccatgcgtcttggtgccttgcaggtagcgaaaaatacgcttgaccgcaacccagtgttcctcttgggggttctccatgaagcgcgatacatagccaacggcgtacgcgatgtctgggcgcgtggcggtcatcaggtgcatcagagcaccaacagcttcgcgaaacggagcgttcaccttggtcgccgcgtcgcttggaaccagtcgagtgctcatgtccaccggactcaccacggccttgcactcgtccatggcgaagcgcttcaggatgtcgtccacgtatcgccgctggcacatggtcacgctgccgtccgggccgtccaccaactcgatcccaagaacaaacgcgcacttgccgctgtcggtcatctcgaagcgcgtcttcaggtcggtcttcgtgcatgcgatcagctcgggcgaactcccggtaatcagtacgtcatccacgtacaccagtacaagcacgcagtgaccgtccaccaccttgatgtagaggcacggatcgaaggccgacacttggaagccgatggagcacacgaactcgtcgaaggtctcgttccacactcgcgaagcttgcttgagaccgtagatggccttcatcagttccaggcagtcgaagtcaccatccagttcgacgccttccggaaccacgcagaagaccacctccttcattatcccgtacaggaatgctgtcaccacgtcgagttggtcgaggggccagccaaaatacttagcaatcgcgatcaccatgcgcagcgtcacatacttgaccacgggcgagaacgtctcggtgtagtcaatgccgtacttctgcttgaagcccttggccacgaggcgcgccttgtacttctcgatcgagccgtccgctttgcgcttgatcttgaacacccacttggtatcgatggcgcgttgtccgttaggcaacttggcagctcgaaacacaccacgcagtcgcatcgacttgagctccgcgcggatcgctttgcgccagtgcacttgatcaggaccgttcacagcctcttggaacgtcgtcggctccgatagatcggctgctgcttccacagcgttggcactggcacgccaaaacactggaggcgtcgagtcgtcgtcttcatcttggtccccagacttttcttcttcgtcggggtcggctcggcgcgaggaggatacgtccggcgcacttgcttcttctaagccagctcggtggcgaacggggcgcgatcttctggcagtgttgtcgtcgccactcggtcggtacttgcgcttccccgcctgcttgaagctcgcttggcgcggtccatcgttgtcgtccaggtccagcgcgtccaagtccagcacagcatcatcgacgtcttcatccgaagtatgcgtcgaaagtccaaaggtcgactcatcgaagttgacatcgcgactgataaccacctgccccgcctcgatgtcataaactcgatacgccttggacacttcttcgtagccgaggaacagcccggcgcgagccttggggtcccacttgcgccgtctttccttcggcgtcaggatgtacgtctggcatccgaacacacgcatgtgcttcacactcggcttggacttgtaaacgatctcgaacggagtcttgtgttcgatcttgggtgatggcagacgattcttcacgtagatggctgtcatggccgcctcagcccagaagctcttgtccagcttggcgtgatgcagcatgctgcggccccatcgtgacgatggtccggatggcgcgttctgccgtgccgttggtctggtgcgcgtacggaaccgtggtttgctgctcgatgccttcgacttcgtagaaggccttgagcgagttggtcgcgaactcacgggctccgtcgtgccgcacaaacttgaccttcttgccgaactgcgtctgcaccttcgtgacgtacatcttgatgcagtcctcgctctccgacttggcacgcaggcagaactccttcatgcatccgctggcttcgtccacgatcagcagcagatacttgctgccacccagtgactcttcttccatggggccgcacacgtcgaagtggagcagctcgaacgtgtcgtagtgacgcttgtcacggttgcttgggaacggcttctggaccattttcccttgctggcagccgcgacacacgcttggtccactcgacttggaaggtgccttcgcgtccttgatcatgttgttgtcgaccatcttgcgaaacacctccaccggagtgtgacccatacgcgcgtgtaagtcgaccgtcttcccactggtcgccgcattcgccgatcgctgaggcgtctggagccagtagagaccatccacgaggtttgccgtcgccaccacttgcttggcgcccttgtgcgcaatctgcatcttggtgctgtcgaacacgacttggaacagaccactcttgttgatctgtggcaccgaaagcagattcttgctcatgcttgggacgtacagcgcgttcttgatctcgatgtcgcgctcgtcgccgttgggcagaaccactcgttccacgatggtccccacacccatgatggccgccttgttgccgtcggccaccgaaagttcgccttcattccgctcaatcaaatgagcgaacttggccttgtcgttgcagatgtggtgcgttgcgccgctgtcgaccgcccacaacccgggcacattcttgcccgtcgaaatgccacactccagtgagaccgcgaacgccactcgatcatagccgtagtcgtagttgtagctggcgtcgtcgttcctccactgggcattgttggccccgcgtccacggccattgccattgccgccgcgtcttgggccccgattctcgtccttctgcttggtccagcacttgtcaatcgtgtgccccaatttcccgcagtacgtacactggcgagactctcggtcggtgttgaacgccttgaccgcattctccgtcttcaccgtcgccgtcttctcgccttgtctcttgatgtgctcattcgtcagcaccttcacgacgtcttgcaatcgtagttcagcgctgctcatctccaagttcagcacgacgttctcgtagctcttggggaggctgcgcaacaggcagatcgccacgtcctcatcctccatcttggcgccgatgctgctgagcttggcgctgatgttgaggacctcgttgcaatgatgcaagacgttgccgccttccgacatctccatgctgaagagttggcgcttcaggtagatgcgtccagccttctgcgaaccaccgtacagcgtcttcaggcgcgtccacgcaacccacgcttcctcgcagtcgtcgaccacatggtggtagtccgcgtccatgtggagcaacatcagtccgaacgcgatgttgctcgacttgacgtagtcgtccttggcccgcgagtccgtgaagctcggcgtcgtctcgcggttcacgacatgccacgtcgacttggtcaggaacacgccacgcatgtagcggttccacgtcgcgtagttgtccccgttgaacttgtcaatggagaccttggtcgaggcgtcttgggcagaggacatggtgcttgggctcataacctgatggaaggtatggatcttggacacgaagctcggacgaagcggagggagggacgtcgcagacggcgggaccggagcgaaggcacttgaggggtagaatgaagattcgaaagtgattgaattgttggagcttacaccctactgttatagacacgcgaccctgcgtcctatcacctagtgcatctaatcaaccatcactcaccggtgttcatccaatcatcctactcgtctaatcatcggtggcgtaaacaacttaccgtaatcaccataatcaacgtgggttcggattggaccggttcgggttaaccggttaatgggtacaactggtacacagtacccaagaccagcaaccctcaatatcaccataatcaacgtgggttcggattggaccggttcgggttaaccggttaatgggtacaactggtacacagtacccaagaccagcaaccctcaataccccccctgaatgcgaagtcccacgaatgccgagagccaccgtcagatccgtgtggcgtggtcccgcaagcgccttcgtcatgatgtccgctagcatcacagaagtctcgcagtactggagcttgacttcgccgcgcttgacttcatcgcggatgtggtggtacttgatgtcgatgtgcttggcgcgaccgtggttcactgggttcttcgtcatcttgatgcacgactggttgtcttcgcggatcatgagttcgggtccagtctcattagcggccgccagaatctcgcatagcaggcgatgaatccacttgccttcttggatagccagactgagcgcgatgtactccgctttattgcttcttgcttccccagctcacaggcgcactcatgagcatgaacgtgtagcctgaagtggacttgcggtcggcgaggtcgccggcccagtccgcgtccgagtagccacgaaagtcgatcttgtcgcccggcttgaagcagatctcatgcgtcttggtgccttgcaggtagcgaaagatacgcttgaccgcaacccagtgttcctcttgggggttctccatgaagcgcgatacatagccaacggcgtacgcgatgtctgggcgcgtggcggtcatcaggtgcatcagagcaccaacagcttcgcgaaacggagcgttcaccttggtcgccgcgtcgcttggaaccagtcgagtgctcatgtccaccggactcaccacggccttgcactcgtccatggcgaagcgcttcaggatgtcgtccacgtatcgccgctggcacatggtcacgctgccgtccaggccgtccaccaactcgatcccaagaacaaacgcgcacttgccgctgtcggtcatctcgaagcgcgtcttcaggtcggtcttcgtgcgtgcgatcagctcgggcgaactcccggtaatcagtacgtcatccacgtacaccagtacaagcacgcagtgaccgtccaccaccttgatgtagaggcacggatcgaaggccgacacttggaagccgatggagcacacgaactcgtcgaaggtctcgttccacactcgcgaagcttgcttgagaccgtagatggccttcaccagttccaggcagtcgaagtcaccatccagttcgacgccttccggaaccacgcagaagaccacctccttcattatcccgtacaggaatgctgtcaccacgtcgagttggtcgaggggccagccaaaatacttagcaatcgcgatcaccatgcgcagcgtcacatacttgaccacgggcgagaacgtctcggtgtagtcaatgccgtacttctgcttgaagcccttggccacgaggcgcgccttgtacttctcgatcgagccgtccgctttgcgcttgatcttgaacacccacttggtatcgatggcgcgttgtccgttaggcaacttggcagctcgaaacacaccacgcagtcgcatcgacttgagctccgcgcggatcgctttgcgccagtgcacttgatcaggaccgttcacagcctcttggaacgtcgtcggctccgatagatcggctgctgcttccacagcgttggcactggcacgccaaaacactggaggcgtcgagtcgtcgtcttcatcttggtccccagacttttcttcttcgtcggggtcggctcggcgcgaggaggatacgtccggcgcacttgcttcttctaagccagctcggtggcgaacggggcgcgatcttctggcagtgttgtcgtcgccactcggtcggtacttgcgcttccccgcctgcttgaagctcgtttggcgcggtccatcgttgtcgtccaggtccagcgcgtccaagtccagcacagcatcatcgacgtcttcatccgaagtatgcgtcgaaagtccaaaggtcgactcatcgaagttgacatcgcgactgataaccacctgccccgcctcgatgtcataaactcaatacgccttggacacttcttcgtagccgaggaacagcccggcgcgagccttggggtcccacttgcgccgtctttccttcggcgtcaggatgtacgtctggcatccgaacacacgcatgtgcttcacactcggcttggacttgtaaacgatcggagtcttgtgttcgatcttgggtgatggcagacgattcttcacgtagatggctgtcatggccgcctcagcccagaagctcttgtccagcttggcgtgatgcagcatgctgcggccaatcgtgacgatggtccggatggcgcgttctgccgtgccgttggtctggtgcgcgtacggaaccgtggtttgctgctcgatgtcttcggcttcgtagaaggccttgagcgagttggtcgcgaactcacgggctccgtcgtgccgcacaaacttgaccttcttgccgaactgcgtctgcaccttcgtgacgtacatcttgatgcagtcctcgctctccgacttggcacgcaggcagaaccccttcatgcatccgctggcttcgtccacgatcagcagcagatacttgctgccacccagtgacttttcttccatggggccgcacacgtcgaagtggagcagctcgaacgtgtcgtagtgacgcttgtcacagttgcttgggaacggcttctggaccattttcccttgctggcagccgcgacacacgcttggtccactcgacttggaaggtgccttcgcgtccttgatcatgttgttgtcgaccatcttgcgaagcacctccaccggagcgtgacccatacgcgcgtgtaagtcgaccgtcttcccactggtcgccgcattcgccgatcgctgaggcgtctggagccagtagagtccatccacgaggtttgccgtcgccaccacttgcttggagcccttgtgcgcaatctgcatcttggtgctgtcgaacacgacttggaacaggccactcttgttgatctgtggcaccgaaagcagattcttgctcatgcttgggacgtacagcgcgttcttgatctcgatgtcgcgctcgtcgccgttgggcagaaccactcgttccacgatggtccccacacccgtggtggccgccttgttgccgtcggccaccgaaagttcgccttcattccgctcaatcaaatgagcgaacttggccttgtcgttgcagatgtggtgcgttgcgccgctgtcgaccgcccacaacccggacacattcttgcccgtcgaaatgccacactccagtgagaccgcgaacgccactcgatcatagccgtagtcgtagttgtagctggcgtcgtcgttcctccactgggcattgttggccccgcgtccacggccattgccattgccgccgcgtcttgggccccgattctcgtccttctgcttggtccagcacttgtcaatcgtgtgccccaatttcccgcagtacgtacactggcgagactctcggtcggtgttgaacgccttggccgcattctccgtcttcaccgtcgccgtcttctcgccttgtctcttgatgtgctcattcgtcagcaccttcacgacgtcttgcgatcgtagttcagcgctgctcatctccaagttcagcacgacgttctcgtagctcttggggaggctgcgcaacaggcagatcgccacgtcctcatcctccatcttggcgccgatgctgctgagcttggcgctgatgttgaggacctcgttgcaatgatgcaagacgttgccgccttccgacatctccatgctgaagagttggcgcttcaggtagatgcgtccagccttctgcgaaccaccgtacagcgtcttcaggcgcgtccacgcaacccacgcttcctcgcagtcgtcgaccacatggtggtagtccgcgtccatgtggagcaacatcagtccgaacacgacttggaacaggccactcttgttgatctgtggcaccgaaagcagattcttgctcatgcttgggacgtacagcgcgttcttgatctcgatgtcgcgctcgtcgccgttggacagaaccactcgttccacgatggtccccacacccatgatggccgccttgttgccgtcggccaccgaaagttcgccttcattccgctcaatcaaatgagcgaacttggccttgtcgttgcagatgtggtgggttgcgccgctgtcgaccgcccacaacccggacacattcttgcccgtcgaaatgccacactccagtgagaccgcgaacgccactcgatcatagccgtagtcgtagttgtagctggcgtcgtcgttcctccactgggcattgttggccccgcgtccacggccattgccattgccgccgcgtcttgggccccgattctcgtccttctgcttggtccagcacttgtcaatcgtgtgccccaatttcccgcagtacgtacactggcgagactctcggtcggtgttgaacgccttggccgcattctccgtcttcaccgtcgccgtcttctcgccttgtctcttgatgtgctcattcgtcagcaccttcacgacgtcttgcaatcgtagttcagcgctgctcatctccaagttcagcacgacgttctcgtagctcttggggaggctgcgcaacaggcagatcgccacgtcctcatcctccatcttggcgccgatgctgctgagcttggcgctgatgttgaggacctcgttgcaatgatgcaagacgttgccgccttccgacatctccatgctgaagagttggcgcttcaagtagatgcgtccagccttctgcgaaccaccgtacagcgtcttcaggcgcgtccacgcaacccacgcttcctcgcagtcgtcgaccacatggtggtagtccgcgtccatgtggagcaacatcagtccgaacacgacttggaacaggccactcttgttgatctgtggcaccgaaagcagattcttgctcatgcttgggacgtacagcgcgttcttgatctcgatgtcgcgctcgtcgccgttgggcagaaccactcgttccacgatggtccccacaaccatggtggccgccttgttgccgtcggccaccgaaagttcgccttcattccgcttgatggatggtatggatcttggacacgaagctcggacgaagcggagggagggacgtcgcagacggcgggaccggagcgaaggcacttgaggggtagaatgaagattcgaaagtgattgaattgttggagcttacaccctactgttatagacacgcgaccctgcgtcctatcacctagtgcatctaatcaaccatcactcaccggtgttcatccaatcatcctactcgtctaatcatcggtggcgtaaacaacttaccgtaatcaccataatcaacgtgggttcggattggaccggttcgggttaaccggttaatgggtacaactggtacacagtacccaagaccagcaaccctcaatacgccccctcaatgcgaagtcccacgaatgccgagagccaccgtcagatccgtgtggcgtggtcccgcaagcgccttcgtcatgatgtccgctagcatcacagaagtctcgcagtactggagcttgacttcgccgcgtttgacttcatcgcggatgtggtggtacttgatgtcgatgtgcttggcgcgaccgtggttcactgggttcttcgtcatcttgatgcacgactggttgtcttcgcggatcatgagttcgggtccagtctcattagcggccgccagaatctcgcatagcaggcgatgaatccacttgccttcttggatagccagactgagcgcgatgtactccgcttcattgcttcttgcttccccagctcacaggcgcactcatgagcatgaacgtgtagcctgaagtggacttgcggtcggcgaggtcgccggcccagtcagcgtccgagtagccacgaaagtcgatcttgtcgcccggcttgaagcagatcccatgcgtcttggtgccttgcaggtagcgaaagatacgcttgaccgcaacccagtgttcctcttgggggttctccatgaagcgcgatacatagccaacggcgtacgcgatgtctgggcgcgtggcggtcatcaggtgcatcagagcaccaacagcttcgcgaaacggagcgttcaccttggtcgccgcgtctcttggaaccagtcgagtgctcatgtccaccggactcaccacggccttgcactcgtccatggcgaagcgcttcaggatgtcgtccacgtatcgccgctggcacatggtcacgctgccgtccgggccgtccaccaactcgatcccaagaacaaacgcgcacttgccgctgtcggtcatctcgaagcgcgtcttcaggtcggtcttcgtgcgtgcgatcagctcgggcgaactcccggtaatcagtacgtcatccacgtacaccagtacaagcacgcagtgaccgtccaccaccttgatgtagaggcacggatcgaaggccgacacttggaagccgatggagcacacgaattcgtcgaaggtctcgttccacactcgcggagcttgcttgagaccgtagatggccttcaccagttccaggcagtcgaagtcaccatccagttcgacgccttccggaaccacgcagaagatcacctccttcattatcccgtacaggaatgctgtcaccacgtcgagttggtcgaggggccagccaaaatacttagcaatcgcgatcaccatgcgcagcgtcacatacttgaccacgggcgagaacgtctcggtgtagtcaatgccgtacttctgcttgaagcccttggccacgaggcgcgccttgtacttctcgatcgagccgtccgctttgcgcttgatcttgaacacccacttggtatcgatggcgcgttgtccgttaggcaacttggcagctcgaaacacaccacgcagtcgcatcgacttgagctccgcgcggatcgctttgcgccagtgcacttgatcaggaccgttcacagcctcttggaacgtcgtcggctccgatagatcggctgctgcttccacagcgttggcactggcacgccaaaacactggaggcgtcgagtcgtcgtcttcatcttggtccccagacttttcttcttcgtcggggtcggctcggcgcgaggaggatacgtccggcgcacttgcttcttctaagccagctcggtggcgaacggggcgcgatcttctggcagtgttgtcgtcgccactcggtcggtacttgcgcttccccgcctgcttgaagctcgtttggcgcggtccatcgttgtcgtccaggtccagcgcgtccaagtccaacacagcatcatcgacgtcttcatccgaagtatgcgtcgaaagtccaaaggtcgactcattgaagttgacatcgcgactgataaccacctgccccgcctcgatgtcataaactcgatacgccttggacacttcttcgtagccgaggaacagcccggcgcgagccttggggtcccacttgcgccgtctttccttcggcgtcaggatgtacgtctggcatccgaacacacgcatgtgcttcacactcggcttggacttgtaaacgatctcgaacggagtcttgtgttcgatcttgggtgatggcagacgattcttcacgtagatggctgtcatggccgcctcagcccagaagctcttgtccagcttggcgtgatgcagcatgctgcggccaatcgtgacgatggtccggatggcgcgttctgccgtgccgttggtctggtgcgcgtacggaaccgtggtttgctgctcgatgcctttgacttcgtagaaggccttgagcgagttggtcgcgaactcacgggctccgtcgtgccgcacaaacttgaccttcttgccgaactgcgtctgcaccttcgtgacgtacatcttgatgcagtcctcgctctccgacttgacacgcaggcagaaccccttcatgcatccgctggcttcgtccacgatcagcaacagatacttgctgccacccagtgactcttcttccatggggccgcacacgtcgaagtggagcagctcgaacgtgtcgtagtgacgcttgtcacggttgcttgggaacggcttctggaccattttcccttgctggcagccgcgacacacgcttggtccactcgacttggaaggtgccttcgcgtccttgatcatgttgttgtcgaccatcttgcgaagcacctccaccggagcgtgacccatacgcgcgtgtaagtcgaccgtcttcccactggtcgccgcattcgccgatcgctgaggcgtctggagccagtagagtccatccacgaggtttgccgtcgccaccacttgcttggagcccttgtgcgcaatctgcatcttggtgctgtcgaacacgacttggaacagaccactcttgttgatctgtggcaccgaaagcagattcttgctcgtgcttgggacgtacagcgcgttcttgatctcgatgtcgcgctcgtcgccgttgggcagaaccactcgttccacgatggtccccacacccatgatggccgccttgttgccgtcggccaccgaaagttcgccttcattccgctcaatcaaatgagcgaacttggccttgtcgttgcagatgtggtgcgttgcgccgctgtcgaccgcccacaacccggacacattcttgcccgtcgaaatgccacactccagtgagaccgcgaacgccactcgatcatagccgtagtcgtagttgtagctggcgtcgtcgttcctccactgggcattgttggccccgagtccacggccattgccattgccgccgcgtcttgggccccgattctcgtccttctgcttggtccagcacttgtcaatcgtgtgccccaatttcccgcagtacgtacactggcgagactctcggtcggtgttgaacgccttggccgcattctccgtcttcaccgtcgccgtctcctcgccttgtctcttgatgtgctcattcgtcagcaccttcacgacgtcttgcgatcgtagttcagcgctgctcatctccaagttcagcacgacgttctcgtagctcttggggaggctgcgcaacaggcagatcgccacgtcctcatcctccatcttggcgccgatgctgctgagcttggcgctgatgttgaggatctcgttgcaatgatgcaagacgttgccgccttccgacatctccatgctgaagagttggcgcttcaggtagatgcgtccagccttctgcgaaccaccgtacagcgtcttcaggcgcgtccacgcaacccacgcttcctcgcagtcgtcgaccacatggtggtagtccgcgtccatgtggagcaacatcagtccgaacgcgatgttgctcgacttgacgtagtcgtccttggcccgcgagtccgtgaagctcggcgtcgtctcgcggttcacgacatgccacgtcgacttggtcaggaacacgccacgcatgtagcggttccacgtcgcgtagttgtccccgttgaacttgtcaatggagaccttggtcgaggcgtcttgggcagaggacatggtgcttgggctcataacctgatggaaggtatggatcttggacacgaagctcggacgaagcggagggagggacgtcgcagacggcgggaccggagcgaaggcacttgagggatagaatgaagattcgaaagtgattgaattgttggagcttacaccctactgttatagacacgcgaccctgcgtcctatcacctagtgcatctaatcaaccatcactcaccggtgttcatccaatcatcctactcgtctaatcatcggtggcgtaaacaactcaccgtaatcaccataatcaacgtgggttcggattggaccggttcgggttaaccgattaatgggtacaactggtacacagtacccaagaccagcaaccctcaatacgccccctcaattcgaagtcccacgaatgccgagagccaccgtcagatccgtgtggcgtggtcccgtaagcgccttcgtcatgatgtccgctagcatcacagaagtctcgcagtactggagcttgacttcgccgcgcttgacttcatcgcggatgtggtggtacttgatgtcgatgtgcttggcgcgaccgtggttcactgggttcttcgtcatcttgatgcacgactggttgtcttcgcggatcatgagttcgggtccagtctcattagcggccgccagaatctcgcatagcaggcgatgaatccacttgccttcttggatagccagactgagcgcgatgtactccgcttcattgcttcttgcttccccagctcacaggcgcactcatgagcatgaacgtgtagcctgaagtggacttgcggtcggcgaggtcgccggcccagtccgcgtccgagtagccacgaaagtcgatcttgtcgctcggcttgaagcagatcccatgcgtcttggtgccttgcaggtagcgaaagatacgcttgaccgcaacccagtgttcctcttgggggttctccatgaagcgcgatacatagccaacggcgtacgcgatgtctgggcgcgtggcggtcatcaggtgcatcagagcaccaacagcttcgcgaaacggagcgttcaccttggtcgccgcgtcgcttggaaccagtcgagtgctcatgtccaccggactcaccacggccttgcactcgtccatggcgaagcgcttcaggatgtcgtccacgtatcgccgctggcacatggtcacgctgccgtccgggccgtccaccaactcgatcccaagaacaaacgcgcacttgccgctgtcggtcatctcgaagcgcgtcttcaggtcggttttcgtgcgtgcgatcagctcgggcgaactcccggtaatcagtacgtcatccacgtacaccagtacaagcacgcagtgaccgtccaccaccttgatgtagaggcacggatcgaaggccgacacttggaagccgatggagcacacgaactcgccgaaggtctcgttccacactcgcgaagcttgcttgagaccgtagatggccttcaccagttccaggcagtcgaagtcaccatccagttcgacgccttccggaaccacgcagaagaccacctccttcattatcccgtacaggaatgctgtcaccacgtcgagttggtcgaggggccagccaaaatacttagcaatcgcgatcaccatgcgcagcgtcacatacttgaccacgggcgagaacgtctcggtgtagtcaatgccgtacttctgcttgaagcccttggccacgaggcgcgccttgtacttctcgatcgagccgtccgctttgcgcttgatcttaaacacccacttggtatcgatggcgcgttgtccgttaggcaacttggcagctcgaaacacaccacgcagtcgcatcgacttgagctccgcgcggatcgctttgcgccagtgcacttgatcaggaccgttcacagcctcttggaacgtcgtcggctccgatagatcggctgctgcttccacagcgttggcactggcacgccaaaacactggaggcgtcgagtcgtcgtcttcatcttggtccccagacttttcttcctcgtcggggtcggctcggcgcgaggaggatacgtccggcgcacttgcttcttctaagccagctcggtggcgaacggggcgcgatgttctggcagtgttgtcgtcgccactcggtcggtacttgcgcttccccgcctgcttgaagctcgtttggcgcggtccatcgttgtcgtccaggtccagcgcgtccaagtccaacacagcatcatcgacgtcttcatccgaagtatgcgtcgaaagtccaaaggtcgactcattgaagttgacatcgcgactgataaccacctgccccgcctcgatggggatcctcagagtcnnnnnnnnnnnnnnnnnnnnnnnnnnnnnnnnnnnnnnnnnnnnnnnnnnnnnnnnnnnnnnnnnnnnnnnnnnnnnnnnnnnnnnnnnnnnnnnnnnnnnnnnnnnnnnnnnnnnnnnnnnnnnnnnnnnnnnnnnnnnnnnnnnnnnnnnnnnnnnnnnnnnnnnnnnnnnnnnnnnnnnnnnnnnnnnnnnnnnnnnnnnnnnnnnnnnnnnnnnnnnnnnnnnnnnnnnnnnnnnnnnnnnnnnnnnnnnnnnnnnnnnnnnnnnnnnnnnnnnnnnnnnnnnnnnnnnnnnnnnnnnnnnnnnnnnnnnnnnnnnnnnnnnnnnnnnnnnnnnnnnnnnnnnnnnnnnnnnnnnnnnnnnnnnnnnnnnnnnnnnnnnnnnnnnnnnnnnnnnnnnnnnnnnnnnnnnnnnnnnnnnnnnnnnnnnnnnnnnnnnnnnnnnnnnnnnnnnnnnnnnnnnnnnnnnnnnnnnnnnnnnnnnnnnnnnnnnnnnnnnnnnnnnnnnnnnnnnnnnnnnnnnnnnnnnnnnnnnnnnnnnnnnnnnnnnnnnnnnnnnnnnnnnnnnnnnnnnnnnnnnnnnnnnnnnnnnnnnnnnnnnnnnnnnnnnnnnnnnnnnnnnnnnnnnnnnnnnnnnnnnnnnnnnnnnnnnnnnnnnnnnnnnnnnnnnnnnnnnnnnnnnnnnnnnnnnnnnnnnnnnnnnnnnnnnnnnnnnnnnnnnnnnnnnnnnnnnnnnnnnnnnnnnnnnnnnnnnnnnnnnnnnnnnnnnnnnnnnnnnnnnnnnnnnnnnnnnnnnnnnnnnnnnnnnnnnnnnnnnnnnnnnnnnnnnnnnnnnnnnnnnnnnnnnnnnnnnnnnnnnnnnnnnnnnnnnnnnnnnnnnnnnnnnnnnnnnnnnnnnnnnnnnnnnnnnnnnnnnnnnnnnnnnnnnnnnnnnnnnnnnnnnnnnnnnnnnnnnnnnnnnnnnnnnnnnnnnnnnnnnnnnnnnnnnnnnnnnnnnnnnnnnnnnnnnnnnnnnnnnnnnnnnnnnnnnnnnnnnnnnnnnnnnnnnnnnnnnnnnnnnnnnnnnnnnnnnnnnnnnnnnnnnnnnnnnnnnnnnnnnnnnnnnnnnnnnnnnnnnnnnnnnnnnnnnnnnnnnnnnnnnnnnnnnnnnnnnnnnnnnnnnnnnnnnnnnnnnnnnnnnnnnnnnnnnnnnnnnnnnnnnnnnnnnnnnnnnnnnnnnnnnnnnnnnnnnnnnnnnnnnnnnnnnnnnnnnnnnnnnnnnnnnnnnnnnnnnnnnnnnnnnnnnnnnnnnnnnnnnnnnnnnnnnnnnnnnnnnnnnnnnnnnnnnnnnnnnnnnnnnnnnnnnnnnnnnnnnnnnnnnnnnnnnnnnnnnnnnnnnnnnnnnnnnnnnnnnnnnnnnnnnnnnnnnnnnnnnnnnnnnnnnnnnnnnnnnnnnnnnnnnnnnnnnnnnnnnnnnnnnnnnnnnnnnnnnnnnnnnnnnnnnnnnnnnnnnnnnnnnnnnnnnnnnnnnnnnnnnnnnnnnnnnnnnnnnnnnnnnnnnnnnnnnnnnnnnnnnnnnnnnnnnnnnnnnnnnnnnnnnnnnnnnnnnnnnnnnnnnnnnnnnnnnnnnnnnnnnnnnnnnnnnnnnnnnnnnnnnnnnnnnnnnnnnnnnnnnnnnnnnnnnnnnnnnnnnnnnnnnnnnnnnnnnnnnnnnnnnnnnnnnnnnnnnnnnnnnnnnnnnnnnnnnnnnnnnnnnnnnnnnnnnnnnnnnnnnnnnnnnnnnnnnnnnnnnnnnnnnnnnnnnnnnnnnnnnnnnnnnnnnnnnnnnnnnnnnnnnnnnnnnnnnnnnnnnnnnnnnnnnnnnnnnnnnnnnnnnnnnnnnnnnnnnnnnnnnnnnnnnnnnnnnnnnnnnnnnnnnnnnnnnnnnnnnnnnnnnnnnnnnnnnnnnnnnnnnnnnnnnnnnnnnnnnnnnnnnnnnnnnnnnnnnnnnnnnnnnnnnnnnnnnnnnnnnnnnnnnnnnnnnnnnnnnnnnnnnnnnnnnnnnnnnnnnnnnnnnnnnnnnnnnnnnnnnnnnnnnnnnnnnnnnnnnnnnnnnnnnnnnnnnnnnnnnnnnnnnnnnnnnnnnnnnnnnnnnnnnnnnnnnnnnnnnnnnnnnnnnnnnnnnnnnnnnnnnnnnnnnnnnnnnnnnnnnnnnnnnnnnnnnnnnnnnnnnnnnnnnnnnnnnnnnnnnnnnnnnnnnnnnnnnnnnnnnnnnnnnnnnnnnnnnnnnnnnnnnnnnnnnnnnnnnnnnnnnnnnnnnnnnnnnnnnnnnnnnnnnnnnnnnnnnnnnnnnnnnnnnnnnnnnnnnnnnnnnnnnnnnnnnnnnnnnnnnnnnnnnnnnnnnnnnnnnnnnnnnnnnnnnnnnnnnnnnnnnnnnnnnnnnnnnnnnnnnnnnnnnnnnnnnnnnnnnnnnnnnnnnnnnnnnnnnnnnnnnnnnnnnnnnnnnnnnnnnnnnnnnnnnnnnnnnnnnnnnnnnnnnnnnnnnnnnnnnnnnnnnnnnnnnnnnnnnnnnnnnnnnnnnnnnnnnnnnnnnnnnnnnnnnnnnnnnnnnnnnnnnnnnnnnnnnnnnnnnnnnnnnnnnnnnnnnnnnnnnnnnnnnnnnnnnnnnnnnnnnnnnnnnnnnnnnnnnnnnnnnnnnnnnnnnnnnnnnnnnnnnnnnnnnnnnnnnnnnnnnnnnnnnnnnnnnnnnnnnnnnnnnnnnnnnnnnnnnnnnnnnnnnnnnnnnnnnnnnnnnnnnnnnnnnnnnnnnnnnnnnnnnnnnnnnnnnnnnnnnnnnnnnnnnnnnnnnnnnnnnnnnnnnnnnnnnnnnnnnnnnnnnnnnnnnnnnnnnnnnnnnnnnnnnnnnnnnnnnnnnnnnnnnnnnnnnnnnnnnnnnnnnnnnnnnnnnnnnnnnnnnnnnnnnnnnnnnnnnnnnnnnnnnnnnnnnnnnnnnnnnnnnnnnnnnnnnnnnnnnnnnnnnnnnnnnnnnnnnnnnnnnnnnnnnnnnnnnnnnnnnnnnnnnnnnnnnnnnnnnnnnnnnnnnnnnnnnnnnnnnnnnnnnnnnnnnnnnnnnnnnnnnnnnnnnnnnnnnnnnnnnnnnnnnnnnnnnnnnnnnnnnnnnnnnnnnnnnnnnnnnnnnnnnnnnnnnnnnnnnnnnnnnnnnnnnnnnnnnnnnnnnnnnnnnnnnnnnnnnnnnnnnnnnnnnnnnnnnnnnnnnnnnnnnnnnnnnnnnnnnnnnnnnnnnnnnnnnnnnnnnnnnnnnnnnnnnnnnnnnnnnnnnnnnnnnnnnnnnnnnnnnnnnnnnnnnnnnnnnnnnnnnnnnnnnnnnnnnnnnnnnnnnnnnnnnnnnnnnnnnnnnnnnnnnnnnnnnnnnnnnnnnnnnnnnnnnnnnnnnnnnnnnnnnnnnnnnnnnnnnnnnnnnnnnnnnnnnnnnnnnnnnnnnnnnnnnnnnnnnnnnnnnnnnnnnnnnnnnnnnnnnnnnnnnnnnnnnnnnnnnnnnnnnnnnnnnnnnnnnnnnnnnnnnnnnnnnnnnnnnnnnnnnnnnnnnnnnnnnnnnnnnnnnnnnnnnnnnnnnnnnnnnnnnnnnnnnnnnnnnnnnnnnnnnnnnnnnnnnnnnnnnnnnnnnnnnnnnnnnnnnnnnnnnnnnnnnnnnnnnnnnnnnnnnnnnnnnnnnnnnnnnnnnnnnnnnnnnnnnnnnnnnnnnnnnnnnnnnnnnnnnnnnnnnnnnnnnnnnnnnnnnnnnnnnnnnnnnnnnnnnnnnnnnnnnnnnnnnnnnnnnnnnnnnnnnnnnnnnnnnnnnnnnnnnnnnnnnnnnnnnnnnnnnnnnnnnnnnnnnnnnnnnnnnnnnnnnnnnnnnnnnnnnnnnnnnnnnnnnnnnnnnnnnnnnnnnnnnnnnnnnnnnnnnnnnnnnnnnnnnnnnnnnnnnnnnnnnnnnnnnnnnnnnnnnnnnnnnnnnnnnnnnnnnnnnnnnnnnnnnnnnnnnnnnnnnnnnnnnnnnnnnnnnnnnnnnnnnnnnnnnnnnnnnnnnnnnnnnnnnnnnnnnnnnnnnnnnnnnnnnnnnnnnnnnnnnnnnnnnnnnnnnnnnnnnnnnnnnnnnnnnnnnnnnnnnnnnnnnnnnnnnnnnnnnnnnnnnnnnnnnnnnnnnnnnnnnnnnnnnnnnnnnnnnnnnnnnnnnnnnnnnnnnnnnnnnnnnnnnnnnnnnnnnnnnnnnnnnnnnnnnnnnnnnnnnnnnnnnnnnnnnnnnnnnnnnnnnnnnnnnnnnnnnnnnnnnnnnnnnnnnnnnnnnnnnnnnnnnnnnnnnnnnnnnnnnnnnnnnnnnnnnnnnnnnnnnnnnnnnnnnnnnnnnnnnnnnnnnnnnnnnnnnnnnnnnnnnnnnnnnnnnnnnnnnnnnnnnnnnnnnnnnnnnnnnnnnnnnnnnnnnnnnnnnnnnnnnnnnnnnnnnnnnnnnnnnnnnnnnnnnnnnnnnnnnnnnnnnnnnnnnnnnnnnnnnnnnnnnnnnnnnnnnnnnnnnnnnnnnnnnnnnnnnnnnnnnnnnnnnnnnnnnnnnnnnnnnnnnnnnnnnnnnnnnnnnnnnnnnnnnnnnnnnnnnnnnnnnnnnnnnnnnnnnnnnnnnnnnnnnnnnnnnnnnnnnnnnnnnnnnnnnnnnnnnnnnnnnnnnnnnnnnnnnnnnnnnnnnnnnnnnnnnnnnnnnnntgcttcacactcggcttggacttgtaaacgatcggagtcttgtgttcgatcttgggtgatggcagacgattcttcacgtagatggctgtcatggccgcctcagcccagaagctcttgtccagcttggcgtgatgcagcatgctgcggccaatcgtgacgatggtccggatggcgcgttctgccgtgccgttggtctggtgcgcgtacggaaccgtggtttgctgctcgatgtcttcgacttcgtagaaggccttgagcgagttggtcgcgaactcacgggctccgtcgtgccgcacaaacttgaccttcttgccgaactgcgtctgcaccttcgtgacgtacatcttgatgcagtcctcgctctccgacttggcacgcaggcagaaccccttcatgcatccgctggcttcgtccacgatcagcagcagatacttgctgccacccagtgactcttcttccatggggccgcacacgtcgaagtggagcagctcgaacgtgtcgtagtgacgcttgtcacagttgcttgggaacggcttctggaccattttcccttgctggcagccgcgacacacgcttggtccactcgacttggaaggtgccttcgcgtccttgatcatgttgttgtcgaccatcttgcgaagcacctccaccggagcgtgacccatacgcgcgtgtaagtcgaccgtcttcccactggtcgccgcattcgccgatcgctgaggcgtctggagccagtagagtccatccacgaggtttgccgtcgccaccacttgcttggagcccttgtgcgcaatctgcatcttggtgctgtcgaacacgacttggaacaggccactcttgttgatctgtggcaccgaaagcagattcttgctcatgcttgggacgtacagcgcgttcttgatctcgatgtcgcgctcgtcgccgttgggcagaaccactcgttccacgatggtccccacacccgtggtggccgccttgttgccgtcggccaccgaaagttcgccttcattccgctcaatcaaatgagcgaacttggccttgtcgttgcagatgtggtgggttgcgccgctgtcgaccgcccacaacccggacacattcttgcccgtcgaaatgccacactccagtgagaccgcgaacgccactcgatcatagccgtagtcgtagttgtagctggcgtcgtcgttcctccactgggcattgttggccccgcgtccacggccattgccattgccgccgcgtcttgggccccgattctcgtccttctgcttggtccagcacttgtcaatcgtgtgccccaatttcccgcagtacgtacactggcgagactctcggtcggtgttgaacgccttggccgcattctccgtcttcaccgtcgccgtcttctcgccttgtctcttgatatgctcattcgtcagcaccttcacgacgtcttgcgatcgtagttcagcgctgctcatctccaagttcagcacgacgttctcgtagctcttggggaggctgcgcaacaggcagatcgccacgtcctcatcctccatcttggcgccgatgctgctgagcttggcgctgatgttgaggacctcgttgcaatgatgcaagacgttgccgccttccgacatctccatgctgaagagttggcgcttcaagtagatgcgtccagccttctgcgaaccaccgtacagcgtcttcaggcgcgtccacgcaacccacgcttcctcgcagtcgtcgaccacatggtggtagtccgcgtccatgtggagcaacatcagtccgaacacgacttggaacaggccactcttgttgatctgtggcaccgaaagcagattcttgctcatgcttgggacgtacagcgcgttcttgatctcgatgtcgcgctcgnnnnnnnnnnnnnnnnnnnnnnnnnnnnnnnnnnnnnnnnnnnnnnnnnnnnnnnnnnnnnnnnnnnnnnnnnnnnnnnnnnnnnnnnnnnnnnnnnnnnnnnnnnnnnnnnnnnnnnnnnnnnnnnnnnnnnnnnnnnnnnnnnnnnnnnnnnnnnnnnnnnnnnnnnnnnnnnnnnnnnnnnnnnnnnnnnnnnnnnnnnnnnnnnnnnnnnnnnnnnnnnnnnnnnnnnnnnnnnnnnnnnnnnnnnnnnnnnnnnnnnnnnnnnnnnnnnnnnnnnnnnnnnnnnnnnnnnnnnnnnnnnnnnnnnnnnnnnnnnnnnnnnnnnnnnnnnnnnnnnnnnnnnnnnnnnnnnnnnnnnnnnnnnnnnnnnnnnnnnnnnnnnnnnnnnnnnnnnnnnnnnnnnnnnnnnnnnnnnnnnnnnnnnnnnnnnnnnnnnnnnnnnnnnnnnnnnnnnnnnnnnnnnnnnnnnnnnnnnnnnnnnnnnnnnnnnnnnnnnnnnnnnnnnnnnnnnnnnnnnnnnnnnnnnnnnnnnnnnnnnnnnnnnnnnnnnnnnnnnnnnnnnnnnnnnnnnnnnnnnnnnnnnnnnnnnnnnnnnnnnnnnnnnnnnnnnnnnnnnnnnnnnnnnnnnnnnnnnnnnnnnnnnnnnnnnnnnnnnnnnnnnnnnnnnnnnnnnnnnnnnnnnnnnnnnnnnnnnnnnnnnnnnnnnnnnnnnnnnnnnnnnnnnnnnnnnnnnnnnnnnnnnnnnnnnnnnnnnnnnnnnnnnnnnnnnnnnnnnnnnnnnnnnnnnnnnnnnnnnnnnnnnnnnnnnnnnnnnnnnnnnnnnnnnnnnnnnnnnnnnnnnnnnnnnnnnnnnnnnnnnnnnnnnnnnnnnnnnnnnnnnnnnnnnnnnnnnnnnnnnnnnnnnnnnnnnnnnnnnnnnnnnnnnnnnnnnnnnnnnnnnnnnnnnnnnnnnnnnnnnnnnnnnnnnnnnnnnnnnnnnnnnnnnnnnnnnnnnnnnnnnnnnnnnnnnnnnnnnnnnnnnnnnnnnnnnnnnnnnnnnnnnnnnnnnnnnnnnnnnnnnnnnnnnnnnnnnnnnnnnnnnnnnnnnnnnnnnnnnnnnnnnnnnnnnnnnnnnnnnnnnnnnnnnnnnnnnnnnnnnnnnnnnnnnnnnnnnnnnnnnnnnnnnnnnnnnnnnnnnnnnnnnnnnnnnnnnnnnnnnnnnnnnnnnnnnnnnnnnnnnnnnnnnnnnnnnnnnnnnnnnnnnnnnnnnnnnnnnnnnnnnnnnnnnnnnnnnnnnnnnnnnnnnnnnnnnnnnnnnnnnnnnnnnnnnnnnnnnnnnnnnnnnnnnnnnnnnnnnnnnnnnnnnnnnnnnnnnnnnnnnnnnnnnnnnnnnnnnnnnnnnnnnnnnnnnnnnnnnnnnnnnnnnnnnnnnnnnnnnnnnnnnnnnnnnnnnnnnnnnnnnnnnnnnnnnnnnnnnnnnnnnnnnnnnnnnnnnnnnnnnnnnnnnnnnnnnnnnnnnnnnnnnnnnnnnnnnnnnnnnnnnnnnnnnnnnnnnnnnnnnnnnnnnnnnnnnnnnnnnnnnnnnnnnnnnnnnnnnnnnnnnnnnnnnnnnnnnnnnnnnnnnnnnnnnnnnnnnnnnnnnnnnnnnnnnnnnnnnnnnnnnnnnnnnnnnnnnnnnnnnnnnnnnnnnnnnnnnnnnnnnnnnnnnnnnnnnnnnnnnnnnnnnnnnnnnnnnnnnnnnnnnnnnnnnnnnnnnnnnnnnnnnnnnnnnnnnnnnnnnnnnnnnnnnnnnnnnnnnnnnnnnnnnnnnnnnnnnnnnnnnnnnnnnnnnnnnnnnnnnnnnnnnnnnnnnnnnnnnnnnnnnnnnnnnnnnnnnnnnnnnnnnnnnnnnnnnnnnnnnnnnnnnnnnnnnnnnnnnnnnnnnnnnnnnnnnnnnnnnnnnnnnnnnnnnnnnnnnnnnnnnnnnnnnnnnnnnnnnnnnnnnnnnnnnnnnnnnnnnnnnnnnnnnnnnnnnnnnnnnnnnnnnnnnnnnnnnnnnnnnnnnnnnnnnnnnnnnnnnnnnnnnnnnnnnnnnnnnnnnnnnnnnnnnnnnnnnnnnnnnnnnnnnnnnnnnnnnnnnnnnnnnnnnnnnnnnnnnnnnnnnnnnnnnnnnnnnnnnnnnnnnnnnnnnnnnnnnnnnnnnnnnnnnnnnnnnnnnnnnnnnnnnnnnnnnnnnnnnnnnnnnnnnnnnnnnnnnnnnnnnnnnnnnnnnnnnnnnnnnnnnnnnnnnnnnnnnnnnnnnnnnnnnnnnnnnnnnnnnnnnnnnnnnnnnnnnnnnnnnnnnnnnnnnnnnnnnnnnnnnnnnnnnnnnnnnnnnnnnnnnnnnnnnnnnnnnnnnnnnnnnnnnnnnnnnnnnnnnnnnnnnnnnnnnnnnnnnnnnnnnnnnnnnnnnnnnnnnnnnnnnnnnnnnnnnnnnnnnnnnnnnnnnnnnnnnnnnnnnnnnnnnnnnnnnnnnnnnnnnnnnnnnnnnnnnnnnnnnnnnnnnnnnnnnnnnnnnnnnnnnnnnnnnnnnnnnnnnnnnnnnnnnnnnnnnnnnnnnnnnnnnnnnnnnnnnnnnnnnnnnnnnnnnnnnnnnnnnnnnnnnnnnnnnnnnnnnnnnnnnnnnnnnnnnnnnnnnnnnnnnnnnnnnnnnnnnnnnnnnnnnnnnnnnnnnnnnnnnnnnnnnnnnnnnnnnnnnnnnnnnnnnnnnnnnnnnnnnnnnnnnnnnnnnnnnnnnnnnnnnnnnnnnnnnnnnnnnnnnnnnnnnnnnnnnnnnnnnnnnnnnnnnnnnnnnnnnnnnnnnnnnnnnnnnnnnnnnnnnnnnnnnnnnnnnnnnnnnnnnnnnnnnnnnnnnnnnnnnnnnnnnnnnnnnnnnnnnnnnnnnnnnnnnnnnnnnnnnnnnnnnnnnnnnnnnnnnnnnnnnnnnnnnnnnnnnnnnnnnnnnnnnnnnnnnnnnnnnnnnnnnnnnnnnnnnnnnnnnnnnnnnnnnnnnnnnnnnnnnnnnnnnnnnnnnnnnnnnnnnnnnnnnnnnnnnnnnnnnnnnnnnnnnnnnnnnnnnnnnnnnnnnnnnnnnnnnnnnnnnnnnnnnnnnnnnnnnnnnnnnnnnnnnnnnnnnnnnnnnnnnnnnnnnnnnnnnnnnnnnnnnnnnnnnnnnnnnnnnnnnnnnnnnnnnnnnnnnnnnnnnnnnnnnnnnnnnnnnnnnnnnnnnnnnnnnnnnnnnnnnnnnnnnnnnnnnnnnnnnnnnnnnnnnnnnnnnnnnnnnnnnnnnnnnnnnnnnnnnnnnnnnnnnnnnnnnnnnnnnnnnnnnnnnnnnnnnnnnnnnnnnnnnnnnnnnnnnnnnnnnnnnnnnnnnnnnnnnnnnnnnnnnnnnnnnnnnnnnnnnnnnnnnnnnnnnnnnnnnnnnnnnnnnnnnnnnnnnnnnnnnnnnnnnnnnnnnnnnnnnnnnnnnnnnnnnnnnnnnnnnnnnnnnnnnnnnnnnnnnnnnnnnnnnnnnnnnnnnnnnnnnnnnnnnnnnnnnnnnnnnnnnnnnnnnnnnnnnnnnnnnnnnnnnnnnnnnnnnnnnnnnnnnnnnnnnnnnnnnnnnnnnnnnnnnnnnnnnnnnnnnnnnnnnnnnnnnnnnnnnnnnnnnnnnnnnnnnnnnnnnnnnnnnnnnnnnnnnnnnnnnnnnnnnnnnnnnnnnnnnnnnnnnnnnnnnnnnnnnnnnnnnnnnnnnnnnnnnnnnnnnnnnnnnnnnnnnnnnnnnnnnnnnnnnnnnnnnnnnnnnnnnnnnnnnnnnnnnnnnnnnnnnnnnnnnnnnnnnnnnnnnnnnnnnnnnnnnnnnnnnnnnnnnnnnnnnnnnnnnnnnnnnnnnnnnnnnnnnnnnnnnnnnnnnnnnnnnnnnnnnnnnnnnnnnnnnnnnnnnnnnnnnnnnnnnnnnnnnnnnnnnnnnnnnnnnnnnnnnnnnnnnnnnnnnnnnnnnnnnnnnnnnnnnnnnnnnnnnnnnnnnnnnnnnnnnnnnnnnnnnnnnnnnnnnnnnnnnnnnnnnnnnnnnnnnnnnnnnnnnnnnnnnnnnnnnnnnnnnnnnnnnnnnnnnnnnnnnnnnnnnnnnnnnnnnnnnnnnnnnnnnnnnnnnnnnnnnnnnnnnnnnnnnnnnnnnnnnnnnnnnnnnnnnnnnnnnnnnnnnnnnnnnnnnnnnnnnnnnnnnnnnnnnnnnnnnnnnnnnnnnnnnnnnnnnnnnnnnnnnnnnnnnnnnnnnnnnnnnnnnnnnnnnnnnnnnnnnnnnnnnnnnnnnnnnnnnnnnnnnnnnnnnnnnnnnnnnnnnnnnnnnnnnnnnnnnnnnnnnnnnnnnnnnnnnnnnnttttggcgtgccagtgccaacgctgtggaagcagcagccgatctatcggagccgacgacgttccaagaggctgtgaacggtcctgatcaagtgcactggcgcaaagcgatccgcgcggagctcaagtcgatgcgactgcgtggtgtgtttcgagctgccaagttgcctaacggacaacgcgtcatcgataccaagtgggtgttcaagatcaagcgcaaagcggacggctcgatcgagaagtacagggcgcgcctcgtggccaagggcttcaagcagaagtacggcattgactacaccgagacgttctcgcccgtggtcaagtatgtgacactgcgcatggtgatcgcgattgctaagtattttggctggcccctcgaccaactcgacgtggtgacagcattcctgtacgggataatgaaggaggtggtcttctgcgtggttccggaaggcgtcgaactggatggtgacttcgactgcctggaactggtgaaggccatctacggtctcaagcaagcttcgcgagtgtggaacgagaccttcgacgagttcgtgtgctccatcggcttccaagtgtcggccttcgatccgagcctctacatcaaggtggtggacggtcactgcgtgcttgtactggtgtacgtggatgacgtactgattaccgggagttcgcccgagctgatcgcacgcacgaagaccgacctgaagacgcgcttcgagatgaccgacagcggcaagtgcgcgtttgttcttgggatcgagttggtggacggcccggacggcagcgtgaccatgtgccagcgacgatacgtggacgacatcctgaagcgcttcgccatggacgagtgcaaggccgtggtgagtccggtggacatgagcactcgactggttccaagcgacgcggcgaccaaggtgaacgctccgtttcgcgaagctgttggtgctctgatgcacctgatgaccgccacgcgcccagacatcgcgtacgccgttggctatgtatcgcgcttcatggagacccccaagaggacactgggttgcggtcaagcgtatctttcgctacctgcaaggcaccaagacgcatgggatctgcttcaagccgggcgacaagatcgactttcgtggctactcggacgcggactgggccggcgacctcgccgaccgcaagtccacttcaggctacacgttcatgctcatgagtgcgcctgtgagctggggaagcaagaagcaatgaagcggagtacatcgcgctcagtctggctatccaagaaggcaagtggattcatcgcctgctatgcgagattctggcggccgctaatgagactggacccgaactaatgatccgcgaagacaactagtcgtgcatcaagatgacgaagaacccagtgaaccacggtcgcgccaagcacatcgacatcaagtaccaccacatccgcgatgaagtcaagcgcggcgaagtcaagctccagtactgcgagacttttgtgatgctagcggacatcatgacgaaggcgcttgcgggaccacgccacacggatctgacggtggctctcggcattcgtgggacttcgcattgagggggcgtattgagggttgctggtcttgggtactgtgtaccagttgtacccattaaccggttaacccgaaccggtccaatccgaacccacgttgattatggtgattacggtaagttgtttacgccaccgatgattagacgagtaggatgattggatgaacaccggtgagtgatggttgattagatgcactaggtgataggacgcagggtcgcgtgtctataacagtagggtgtaagctccaacatttcaatcactttcgaatcttcattctacccctcaagtgccttcgctccggtcccgccgtctgcgacgtccctccctccgcttcgtccgagcttcgtgtccaagatccataccttccatcaggcgtcgagtcgtcgtcttcatcttggtccccagacttttcttcttcgtcggggtcggctcggcgcgaggaggatacgtccggcgcactttcttcttctaagccagctcggtggcgaacggggcgcgatcttctggcagtgttgtcgtcgccactcggtcggtacttgcgcttccccgcctgcttgaagctcgtttggcgcggtccatcgttgtcgtccaggtccagcgcgtccaagtccagcacagcatcatcgacgtcttcatccgaagtatgcgtcgaaagtccaaaggtcgactcatcgaagttgacatcgcgactgataaccacctgccccgcctcgatgtcataaactcgatacgccttggacacttcttcgtagccgaggaacagcccggcgcgagccttggggtcccacttgcgccgtctttccttcggcgtcaggatgtacgtctggcatccgaacacacgcatgtgcttcacactcggcttggacttgtaaacgatctcgaacggagtcttgtgttcgatcttgggtgatggcagacgattcttcacgtagatggctgtcatggccgcctcagcccagaagctcttgtccagcttggcgtgatgcagcatgctgcggccaatcgtgacgatggtccggatggcgcgttctgccgtgccgttggtctggtgcgcgtacggaaccgtggtttgctgctcgatgccttcgacttcgtagaaggccttgagcgagttggtcgcgaactcacgggctccgtcgtgaccttcttgccgaactgtgtctgcaccttcgtgacgtacatcttgatgcagtcctcgctctccgacttggcacgcaggcagaaccccttcatgcatccgctggcttcgtccacgatcagcagcagatacttgctgccacccagtgactcttcttccatggggccgcacacgtcgaagtggagcagctcgaacgtgtcgtagtgacgcttgtcacggttgcttgggaacggctcctggaccattttcccttgctggcagccgcgacacacgcttggtccactcggcttggaaggtgccttcgcgtccttgatcatgttgttgtcgaccatcttgcgaagcacctccaccggagcgtgacccatacgcgcgtgtaagtcgaccgtcttcccactggtcgccgcattcgccgatcgctgaggcgtctggagccagtagagtccatccacgaggtttgccgtcgccaccacttgcttggagcccttgtgcgcaatctgcatcttggtgctgtcgaacacgacttggaacagaccactcttgttgatctgtggcaccgaaagcagattcttgctcatgcttgggacgtacagcgcgttcttgatctcgatgtcgcgctcgtcgccgttgggcagaaccactcgttccacgatggtccccacacccatgatggccgccttgttgccgtcggccaccgaaagttcgccttcattccgctcaatcaaatgagcgaacttggccttgtcgttgcagatgtggtgcgttgcgccgctgtcgaccgcccacaacccggacacattcttgcccgtcgaaatgccacactccagtgagaccgcgaacgccactcgatcatagccgtagtcgtagttgtagctggcgtcgtcgttcctccactgggcattgttggccccgcgtccacggccattgccattgccgccgtgtcttgggccccgattctcgtccttctgcttggtccagcacttgtcaatcgtgtgccccaatttcccgcagtacgtacactggcgagactctcggtcggtgttgaacgccttggccgcattctccgtcttcaccgtcgccgtcttctcgccttgtctcttgatgtgctcattcgtcagcaccttcacgacgtcttgcgatcgtagttcagcgctgctcatctccaagttcagcacgacgttctcgtagctcttggggaggctgcgcaacaggcagatcgccacgtcctcatcctccatcttggcgccgatgctgctgagcttggcgctgatgttgaggacctcgttgcaatgatgcaagacgttgccgccttccgacatctccatgctgaagagttggcgcttcaggtagatgcgtccagccttctgcgaaccaccgtacagcgtcttcaggcgcgtccacgcaacccacgcttcctcgcagtcgtcgaccacatggtggtagtccgcgtccatgtggagcaacatcagtccgaacgcgatgttgctcgacttgacgtagtcgtccttggcccgcgagtccgtgaagctcggcgtcgtctcgcggttcacgacatgccacgtcgacttggtcaggaacacgccacgcatgtagcggttccacgtcgcgtagttgtccccgttgaacttgtcaatggagaccttggtcgaggcgtcttgggcagaggacatggtgcttgggctcataacctgatggaaggtatggatcttggacacgaagctcggacgaagcggagggagggacgtcgcagacggcgggaccggagcgaaggcacttgaggggtagaatgaagattcgaaagtgattgaattgttggagcttacaccctactgttatagacacgcgaccctgcgtcctatcacctagtgcatcaaatcaaccatcactcaccggtgttcatccaatcatcctactcgtctaatcatcggtggcgtaaacaacttaccgtaatcaccataatcaacgtgggttcggattggaccggttcgggttaaccggttaatgggtacaactggtacacagtacccaagaccagcaaccctcaataacgcctccagtgttttggcgtgccagtgccaacgctgtggaagcagcagccgatctatcggagccgacgacgttccaagaggctgtgaacggtcctgatcaagtgcactggcgcaaagcgatccgcgcggagctcaagtcgatgcgactgcgtggtgtgtttcgagctgccaagttgcctaacggacaacgcgccatcgataccaagtgggtgttcaagatcaagcgcaaagcggacggctcgatcgagaagtacaaggcgcgcctcgtggccaagggcttcaagcagaagtacggcattgactacaccgagacgttctcgcccgtggtcaagtatgtgacgctgcgcatggtgatcgcgattgctaagtattttggctggcccctcgaccaactcgacgtggtgacagcattcctgtacgggataatgaaggaggtggtcttctgcgtggttccggaaggcgtcgaactggatggtgacttcgactgcctggaactggtgaaggccatctacggtctcaagcaagcttcgcgagtgtggaacgagaccttcgacgagttcgtgtgctccatcggcttccaagtgtcggccttcgatccgtgcctctacatcaaggtggtggacggtcactgcgtgcttgtactggtgtacgtggatgacgtactgattaccgggagttcgcccgagctgatcgcacgcacgaagaccgacctgaagacgcgcttcgagatgaccgacagcggcaagtgcgcgtttgttcttgggatcgagttggtggacggcccggacggcagcgtgaccatgtgccagcggcgatacgtggacgacatcctgaagcgcttcgccatggacgagtgcaaggccgtggtgagtccggtggacatgagcactcgactggttccaagcgacgcggcgaccaaggtgaacgctccgtttcgcgaagctgttggtgctctgatgcacctaatgaccgccacgcgcccagacatcgcgtacgccgttggctatgtatcgcgcttcatggagaacccccaagaggaacactgggttgcggtcaagcgtatctttcgctacctgcaaggcaccaagacgcatgggatctgcttcaagccgggcgacaagatcgacgttcgtggctactcggacgcggactgggccggcgacctcgccgaccgcaagtccacttcaggctacacgttcatgctcatgagtgcgcctgtgagctggggaagcaagaagcaatgaagcggagtacatcgcgctcagtctggctatccaagaaggcaagtggattcatcgcctgctatgcgagattctggcggccgctaatgagactggacccgaactcatgatccgcgaagacaaccagtcgtgcatcaagatgacgaagaacccagtgaaccacggtcgcgccaagcacatcgacatcaagtaccaccacatccgcgatgaagtcaagcgcggcgaagtcaagctccagtactgcgagacttctgtgatgctagcggacatcatgacgaaggcgcttgcgggaccacgccacacggatctgacggtggctctcggcattcgtgggacttcgcattgagggggcgtattgagggttgctactgtgtaccagttgtacccattaaccggttaacccgaaccggtccaatccgaacccacgttgattatggtgattacggtaagttgtttaggccaccgatgattagacgagtaggatgattggatgaacaccggtgagtgatggttgattagatgcactaggtgataggacgcagggtcgcgtgtctataacagtagggtgtaagctccaacaattcaatcactttcgaatcttcattctacccctcaagtgccttcgctccggtctcgccgtctgcgacgtccctccctccgcttcgtccgagcttcgtgtccaagatccataccttccatcaaccgtactgggtgcgaacgtagtcaggatccccttgtgacgccaagacgtgacgcccggacccggcttctcgatcaccttcaattcttctggtttgagctcgttcatgtccttgcgggccaggggcgatttcttgcggtcatcgctcggtcgggccttcctccgtttcttgaccgagggtgcactggacaccgaatccgactgtgacgacatcgaactggtacgacgcttggacctgcgaagaggcgacaccggatcttgagtgcttgacgagtcctgtacagtactggcagcgcacgcagctcatcctctctggccttggcccgagcgatcttggctttctcttccgcactgggttcccacgtggcgtcacgactctcgctgtcgccctcgtcgtcatccggtccgagaagcaagtcgctgtcatcctgagtgtagtcgatcaggtttggccagtattccggtgtctcgcagtcgtctgcccaccgttccagtatcgcctccgcgcgcaagtagtaaatctccgggacgtacggcgtccagtacgtggagtccaagcgattccagaacatcatgcgcgctagcatacaggacaactcgaacgggaagaacatgtcgtgggccaccgtgtccttatccagcagtttcatggcagcgtgatacgttaatccggtgcgcatgaccagctggacgtcggtacggactttacgccgcacaatcgggaggttggccaaggaggcgcacgcagtcttctcgtcgatcaggtactccttgccgaccgggcgagcagcgtcgcctgacgcaccccatgcaatagggcgccactgcacttggtccggcacctcacgttgacgcttggccgtaccggatgacggtcgtgcagaagcctgctctttcggtctggagtcgccggtgagatccagaatggagacgcgccggccgcttggtttggtgctcccgctcgatccagagttgccattcggtccggagtcgccaccgttatctttctcttcggtgtcgtctccgtggcgaaagttgaacggaccaggctcggcgagcatatcatctgccgaagtgacgttgatcagtgtctgccattcaggtggcggagtcgtaccgagcttgtgatgcttgaacagctcctccaggcgatgccagtttccggtcaccttggtctggttgcggttcaggaagttcatcattcggtccacgtcgaaggcgtgagacgagagagactcgacacacttgttgacgtaccgagcttagcctctagtgctgcaatctggtcccgcagagactgcttttcgctttcgtgctctgccatcaacttcttgaagtccgcccggtaacgctcggtggtcctctccttttcctccttgaggtggtccgtgatgacctgccactgcccgaccaactgacccaacgcgacctgaagctgtgtgttctccttctgagtggcgaacagcatgtcagccgtaccggatccctgcgtctccacttggtgccgcatgaaccgatacttgacgatcatacgccgcatgatggtggtcataccgaatactcgcgtagccaagtcacgacactcgtagacggaccatctcgcgacgcgcagaaagagaattgagcagggtctccaattcggtcgggttgggcgaatcgtcgagaggccgaagaaagaactcgttgacgtcctcgcgctcgccgaccagctcattcagttcggccaagtctgtagcagtgagcccctcgatcgacgtcagcacttccagtccgccatacccttcgcggacaaagcggttgctgccgatgtgatctagacgcgtagggacgctgaccatgcagaatgcgccgtctggcttgtactcaggaggagggtcccacacggctgaagacccgttgtcagctggcgcaccgaagttggccgctgccgggagaccggcacccgcgggcatggcgagagcctcttgcgtggacaggatgcgcccggaaatactgcgctccttgcggagcacgcgctgggtgaagttgtcgccctcttgagtgaatggagactgccgaccacttgcattgtcttcgttctcgatatctgcacccttgttggaatcgatggcgcgcttgagcgtcgtagcgccgctgctcatcttctcggtggagttaccgccttgaatggcgccgtcgctggacgcgcgcttgttgccgcagccgccggcgcttccattcggccatggcgctgatgagttgctcgatggagaatggattctgttttgaggcagacagcttatgccagttggattgtgatgcgcggagacccgccacggagacgggacgttggatgacatgcgttctcggaaagactctctcaactgttttgcgattcggtacgaccctccgttcggagtgggagccatcgtgggtctggtcatgtcctgtcccctcggtggcaagatcctctgtgaaagaacctgagcagaggggcagttgacacgatgtggaaacagatttttgtctgcacccatgtccgaccccatggatacgtggacccttcggtgagctgtgattggtcgcatgagatggagatccggtagagacgagtgtgacgtgtggattgtggatgtgtgtggagacttggtgggacccggcacttgcagcaagcatggactcacaggattggagatgcgcccaccggatgagcgctcatattcggtggggagtcacgcatcctgtccgtccgccgacttccctaacggcaggataggcccaagacgcgaaagtgtggccagcgaacgtatcctggccactgcctgcattggctcagtcaagttgtcggaccaccccactgaatcgccccaccagacatgatcacacgcgcacagaccctgttagatgaagcctcgtgttgtccggaccggatcgtggtgcaccctgatggaaggtatggatcttggacacgaagctcggacgaagcggagggagggacgtcgcagacggcgagaccggagcgaaggcacttgaggggtagaatgaagattcgaaagtgattgaattgttggagcttacaccctactgttatagacacgcgaccctgcgtcctatcacctagtgcatctaatcaaccatcactcaccggtgttcatccaatcatcctactcgtctaatcatcggtggcgtaaacaacttaccgtaatcaccataatcaacgtgggttcggattggaccggttcgggttaaccggttaatgggtacaactggtacacagtacccaagaccagcaaccctcaatacaactggtacacagtacccaagaccagcaaccctcaatacgccccctcaatgcgaagtcccacgaatgccgagagccaccgtcagatccgtgtggcgtggtcccgcaagcgccttcgtcatgatgtccgctagcatcacagaagtctcgcagtgctggagcttgacttcgccgcgcttgacttcatcgcggatgtggtggtacttgatgtcgatgtgcttggcgcgaccgtggttcactgggttcttcgtcatcttgatgcacgactggttgtcttcgcggatcatgagttcgggtccagtctcattagcggccgccagaatctcgcatagcaggtgatgaatccacttgccttcttggatagccagactgagcgcgatgtactccgcttcattgcttcttgcttccccagctcacaggcgcactcatgagcatgaacgtgtagcctgaagtggacttgcggtcggcgaggtcgccggcccagtccgcgtccgagtagcaacgaaagtcgatcttgtcgcccggcttgaagcagatcccatgcgtcttggtgccttgtaggtagcgaaagatacgcttgaccgcaacccagtgttcctcttgggggttctccatgaagcgcgatacatagccaacggcgtacgcgatgtctgggcgcgtggcggtcattaggtgcatcagagcaccaacagcttcgcgaaacggagcgttcaccttggtcgccgcgtcgcttgaaaccagtcgagtgctcatgtccaccggactcaccacggccttgcactcgtccatggcgaagcgcttcaggatgtcgtccacgtatcgccgctggcacatggtcacgctgccgtccgggccgtccaccaactcgatcccaagaacaaacgcgcacttgccgctgtcggtcatctcgaagcgcgtcttcaggtcggtcttcgtgcgtgcgatcagctcgggcgaactcccggtaatcagtacgtcatccacgtacaccagtacaagcacgcagtgaccgtccaccaccttgatgtagaggcacggatcgaaggccgacacttggaagccgatggagcacacgaactcgtcgaaggtctcgttccacactcgcgaagcttgcttgagaccgtagatggccttcaccagttccaggcagtcgaagtcaccatccagttcgacgccttccggaaccacgcagaagaccacctccttcattatcccgtacaggaatgctgtcaccacgtcgagttggtcgaggggccagccaaaatacttagcaatcgcgatcaccatgcgcagcgtcacatacttgaccacgggcgagaacgtctcggtgtagtcaatgccgtacttctgcttgaagcccttggccacgaggcgcgccttgtacttctcgatcgagccgtccgctttgcgcttgatcttgaacacccacttggtatcgatggcgcgttgtccgttaggcaacttggcagctcgaaacacaccacgcagtcgcatcgacttgagctccgcgcggatcgctttgcgccagtgcacttgatcaggaccgttcacagcctcttggaacgtcgtcggctccgatagatcggctgctgcttccacagcgttggcactggcacgccaaaacactggaggcgtcgagtcgtcgtcttcatcttggtccccagacttttcttcttcgtcggggtcggctcggcgcgaggaggatacgtccggcgcactttcttcttctaagccagctcggtggcgaacggggcgcgatcttctggcagtgttgtcgtcgccactcggtcggtacttgcgcttccccgcctgcttgaagctcgtttggcgcggtccatcgttgtcgtccaggtccagcgcgtccaagtccagcacagcatcatcgacgtcttcatccgaagtatgcgtcgaaagtccaaaggtcgactcatcgaagttgacatcgcgactgataaccacctgccccgcctcgatgtcataaactcgatacgcgttggacacttcttcgtagccgaggaacagcccggcgcaagccttggggtcccacttgcgccgtctttccttcggcgtcaggatgtacgtctggcatccgaacacacgcatgtgcttcacactcggcttggacttgtaaacgatctcgaacggagtcttgtgttcgatcttgggtgatggcagacgattcttcatgtagatggctgtcatggccgcctcagcccagaagctcttgtccagcttggcgtgatgcagcatgctgcgaccaatcgtgacgatggtccggatggcgcgttctgccgtgccgttggtctggtgcgcgtacggaaccgtggtttgctgctcgatgccttcgacttcgtagaaggccttgagcgagttggtcgcgaactcacgggctccgtcgtgccgcacaaacttgaccttcttgccgaactgcgtctgcaccttcgtgacgtacatcttgatgcagtcctcgctctccgacttggcacgcaggcagaaccccttcatgcatccgctggcttcgtccacgatcagcaacagatacttgctgccacccagtgactcttcttccatggggccgcacacgtcgaagtggagcagctcgaacgtgtcgtagtgacgcttgtcacggttgcttgggaacggcttctggaccattttcccttgctagcagccgcgacacacgcttggtccactcgacttggaaggtgccttcgcgtccttgatcatgttgttgtcgaccatcttgcgaagcacctccaccggagcgtgacccatacgcgcgtgtaagtcgaccgtcttcccactggtcgccgcattcgccgatcgctgaggcgtctggagccagtagagtccatccacaaggtttgccgtcgccaccacttgcttggagcccttgtgcgcaatctgcatcttggtgctgtcgaacacgacttggaacagaccactcttgttgatctgtggcaccgaaagcagattcttgctcatgcttgggacgtacagcgcgttcttgatctcgatgtcgcgctcgtcgccgttgggcagaaccactcgttccacgatggtccccacacccatgatggccgccttgttgccgtcggccaccgaaagttcgccttcattccgctcaatcaaatgagcgaacttggccttgtcgttgcagatgtggtgcgttgcgccgctgtcgaccgcccacaacccggacacattcttgcccgtcgaaatgccacactccagtgagaccgcgaacgccactcgatcatagccgtagtcgtagttgtagctggcgtcgtcgttcctccactgggcattgttggccccgcgtccacggccattgccattgccgccgcgtcttgggccccgattctcgtccttctgcttggtccagcacttgtcaatcgtgtgccccaatttcccgcagtacgtacactggcgagactctcggtcggtgttgaacgccttggccgcattctccgtcttcaccgtcgccgtcttctcgccttgtctcttgatgtgctcattcgtcagcaccttcacgacgtattgcgatcgtagttcagcgctgctcatctccaagttcagcacgacgttctcgtagctcttggggaggctgcgcaacaggcagatcgccacgtcctcatcctccatcttggcgccgatgctgctgagcttggcgctgatgttgaggacctcgttgcaatgatgcaagacgttgccgccttccgacatctccatgctgaagagttggcgcttcaggtagatgcgtccagccttctgcgaaccaccgtacagcgtcttcaggcgcgtccacgcaacccacgcttcctcgcagtcgtcgaccacatggtggtagtccgcgtccatgtggagcaacatcagtccgaacgcgatgttgctcgacttgacgtagtcgtccttggcccgcgagtccgtgaagctcggcgtcgtctcgcggttcacgacatgccacgtcgacttggtcaggaacacgccacgcatgtagcggttccacgtcgcgtaattgtccccgttgagcttgtcaatggagaccttggtcgaggcgtcttgggcagaggacatggtgcttgggctcataacctgatggaacgtatggatcttggacacgaagctcggacgaagcgtagggaatgacgtcgcagacggcgggaccggagcgaaggcacttgaggggtagaatgaagattcgaaagtgattgaattgttggagcttacaccctactgttatagacacgcgaccctgcgtcctatcacctagtgcatctaatcaaccatcactcaccggtgttcatccaatcatcctactcgtctaatcatcggtggcgtaaacaacttaccgtaatcaccataatcaacgtgggttcggattggaccggttcgggttaaccggttaatgggtacaactggtacacagtacccaagaccagcaaccctcaatacgccccctcaatgcgaagtcccacgaatgccgagagccaccgtcagatccgtgtggcgtggtcccgcaagcgccttcgtcatgatgtccgctagcatcacagaagtctcgcagtactggagcttgacttcgccgcgcttgacttcatcgcggatgtggtggtacttgatgtcgatgtgcttggcgcgaccgtggttcactgggttcttcgtcatcttgatgcacgactggttgtcttcgcggatcatgagttcgggtccagtctcattagcggccgccagaatctcgcatagcaggcgatgaatccacttgccttcttggatagccagactgagcgcgatgtactccgcttcattgcttcttgcttccccagctcacaggcgcactcatgagcatgaacgtgtagcctgaagtggacttgcggtcggcgaggtcgccggcccagtccgcgtccgagtagccacgaaagtcgatcttgtcgcccggcttgaagcagatcccatgcgtcttggtgccttgcaggtagcgaaagatacgcttgaccgcaacccagtgttcctcttgggggttctccatgaagcgcgatacatagccaacggcgtacgcgatgtctgggcgcgtggcggtcatcaggtgcatcagagcaccaacagcttcgcgaaacggagcgttcaccttggtcgccgcgtcgcttggaaccagtcgagtgctcatgtccaccggactcaccccggccttgcactcgtccatggcgaagcgcttcaggatgtcgtccacgtatcgccgctggcacatggtcacgctgccgtccgggccgtccaccaactcgatcccaagaacaaacgcgcacttgccgctgtcggtcatctcgaagcgcgtcttcaggtcggtcttcgtgcgtgcgatcagctcgggcgaactcccggtaatcagtacgtcatccacgtacaccagtacaagcacgcagtgaccgtccaccaccttgatgtagaggctcggatcgaaggccgacacttggaagccgatggagcacacgaactcgtcgaaggtctcgttccacactcgcgaagcttgcttgagaccgtagatggccttcaccagttccaggcagtcgaagtcaccatccagttcgacgccttccggaaccacgcagaagaccacctccttcattatcccgtacaggaatgctgtcaccacgtcgagttggtcgaggggccagccaaaatacttagcaatcgcgatcaccatgcgcagtgtcacatacttgaccacgggcgagaacgtctcggtgtagtcaatgccgtacttctgcttgaagcccttggccacgaggcgcgccttgtacttctcgatcgagccgtccgctttgcgcttgatcttgaacacccacttggtatcgatggcgcgtcgtccgttaggcaatgatggaaggtatggatcttggacacgaagctcggacgaagcggagggagggacgtcgcagacggcgggaccggagcgaaggcacttgaggggtagaatgaagattcgaaagtgattgaattgttggagcttacaccctactgttatagacacgcgaccctgcgtcctatcacctagtgcatctaatcaaccatcactcaccggtgttcatccaatcatcctactcgtctaatcatcggtggcgtaaacaacttaccgtaatcaccataatcaacgtgggttcggattggaccggttcgggttaaccgattaatgggtacaactggtacacagtacccaagaccagcaaccctcaatacgccccctcaattcgaagtcccacgaatgccgagagccactgtcagatccgtgtggcgtggtcccgcaagcgccttcgtcatgatgtccgctagcatcacagaagtctcgcagtactggagcttgacttcgccgtgcttgacttcatcgcggatgtggtggtacttggtgtcgatatgcttggcgcgaccgtggttcactgggttcttcgtcatcttgatgcacaactggttgtcttcgcggatcatgagttcgggtccagtctcattagcggccgccagaatctcgcatagcaggcgatgaatccacttgccttcttggatagccagactgagcgcgatgtactccgcttcattgcttcttgcttccccagctcacaggcgcactcatgagcatgaacgtgtagcctgaagtggacttgcggtcggcgaggtcgccggcccagtccgcgtccgagtagccacgaaagtcgatcttgtcgcccggcttgaagcagatcccatgcgtcttggtgccttgcaggtagcgaaagatacgcttgaccgcaacccagtgttcctcttgggggttctccatgaagcgcgatacatagccaacggcgtacgcgatgtctgggcgcgtggcggtcatcaggtgcatcagagcaccaacagcttcgcgaaacggagcgttcaccttggtcgccgcgtcgcttggaaccagtcgagtgctcatgtccaccggactcaccacggccttgcactcgtccatggcgaagcgcttcaggatgtcgtccacgtatcgccgctggcacatggtcacgctgccgtccgggccgtccaccaactcgatcccacgaacaaacgcgcacttgccgctgtcggtcatctcgaagcgcgtcttcaggtcggtcttcgtgcgtgcgatcagctcgggcgaactcccggtaatcagtacgtcatccacgtacaccagtacaagcacgcagtgaccgtccaccaccttgatgtagaggcacggatcgaaggccgacacttggaagccgatggagcacacgaactcgtcgaaggtctcgttccacactcgcgaagcttgcttgagaccgtagatggccttcaccagttccaggcagtcgaagtcaccatccagttcgacgccttccggaaccacgcagaagaccacctccttcattatcccgtacaggaatgctgtcaccacgtcgagttggtcgaggggccagccaaaatacttagcaatcgcgatcaccatgcgcagcgtcacatacttgaccacgggcgagaacgtctcggtgtagtcaatgccgtacttctgcttgaagcccttggccacgaggcgcgccttgtacttctcgatcgagccgtccgctttgcgcttgatcttgaacacccacttggtatcgatggcgcgttgtccgttaggcaacttggcagctcgaaacacaccacgcagtcgcatcgacttgagctctgcgcggatcgctttgcgccagtgcacttgatcaggaccgttcacagcctcttggaacgtcgtcggctccgatagatcggctgctgcttccacagcgttggcactggcacgccaaaacactggaggcgtcgagtcgtcgtcttcatcttggtccccagacttttcttcctcgtcggggtcggctcggcgcgaggaggatacgtccggcgcacttgcttcttctaagccagctcggtggcgaacggggcgcgatgttctggcagtgttgtcgtcgccactcggtcggtacttgcgcttccccgcctgcttgaagctcgtttggcgcggtccatcgttgtcgtccaggtccagcgcgtccaagtccaacacagcatcatcgacgtcttcatccgaagtatgcgtcgaaagtccaaaggtcgactcattgaagttgacatcgcgactgataaccacctgccccgcctcgatgtcataaactcgatacgccttggacacttcttcgtagccgaggaacagcccggcgcgagccttggggtcccacttgcgccgtctttccttcggcgtcaggatgtacgtctggcatccgaacacacgcatgtgcttcacactcggcttggacttgtaaacgatctcgaacggagtcttgtgttcgatcttgggtgatggcagacgattcttcacgtagatggctgtcatggccgcctcagcccagaagctcttgtccagcttggcgtgatgcagcatgctgcggccaatcgtgacgatggtccggatggcgcgttctgtcgtgccgttggtctggtgcgcgtacggaaccgtggtttgctgctcgatgccttcgacttcgtagaaggccttgagcgagttggtcgcgaactcacgggctccgtcgtgccgcacaaacttgaccttcttgccgaactgcgtctgcaccttcgtgacgtacatcttgatgcagtcctcgctctccgacttggcacgcaggcagaaccccttcatgcatccgctggcttcgtccacgatcagcagcagatacttgctgccactcagtgactcttcttccatggggccgcacacgtcgaagtggagcagctcgaacgtgtcgtagtgacgcttgtcacggttgcttgggaacggcttctggaccattttcccttgctggcagccgcgacacacgcttggtccactcgacttggaaggtgccttcgcgtccttgatcatgttgttgtcgaccatcttgcgaagcacctccaccggagtgtgacccatacgcgcgtgtaagtcgaccgtcttcccactggtcgccgcattcgccgatcgctgaggcgtctggagccagtagagaccatccacgaggtttgccgtcgccaccacttgcttggcgcccttgtgcgcaatctgcatcttggtgctgtcgaacacgacttggaacagaccactcttgttgatctgtggcaccgaaagcagattcttgctcatgcttgggacgtacagcgcgttcttgatctcgatgtcgcgctcgtcgccgttgggcagaaccactcgttccacgatggtccccacacccatgatggccgccttgttgccgtcggccaccgaaagttcgccttcattccgctcaatcaaatgagcgaacttggccttgtcgttgcagatgtggtgcgttgcgccgctgtcgaccgcccacaacccggacacattcttgcccgtcgaaatgccacactccagtgagaccgcgaacgccactcgatcatagccgtagtcgtagttgtagctggcgtcgtcgttcctccactgggcattgttggccccgcgtccacggccattgccattgccgccgcgtcttgggccccgattctcgtccttctgcttggtccagcacttgtcaatcgtgtgccccaatttcccgcagtacgtacactggcgagactctcggtcggtgttgaacgccttggccgcattctccgtcttcaccgtcgccgtcttctcgccttgtctcttgatgtgctcattcgtcagcaccttcacgacgtcttgcgatcgtagttcagcgctgctcatctccaagttcagcacgacgttctcgtagctcttggggaggctgcgcaacacacgtcctcatcctccatcttggcgccgatgctgctgagcttggcgctgatgttgaggacctcgttgcaatgatgcaagacgttgccgccttccgacatctccatgctgaagagttggcgcttcaggtagatgcgtccagccttctgcgaaccaccgtacagcgtcttcaggcgcgtccacgcaacccacgcttcctcgcagtcgtcgaccacatggtggtagtccgcgtccatgtggagcaacatcagtccgaacgcgatgttgctcgacttgacgtagtcgtccttggcccgcgagtccgtgaagctcggcgtcgtctcgcggttcacgacatgccacgtcgacttggtcaggaacacgccacgcatgtagcggttccacgtcgcgtagttgtccccgttgaacttgtcaatggagaccttggtcgaggcgtcttgggcagaggacatggtgcttgggctcataacctgatggaaggtatggatcttggacacgaagctcggacgaagcggagggagggacgtcgcagacggcgggaccggagcgaaggcacttgaggggtagaatgaaaattcgaaagtgattgaattgttggagcttacaccctactgttatagacacgcgaccctgcgtcctatcacctagtgcatctaatcaaccatcactcaccggtgttcatccaatcatcctactcgtctaatcatcggtggcgtaaacaacttaccgtaatcaccataatcaacgtgggttcggattggaccggttcgggttaaccggttaatgggtacaactggtacacagtacccaagaccagcaaccctcaatagttctgtcgaaaaatacaaggctcgcttggtcgcgaagggcttcgggcagaaatatggcatcgactacacggagacgttttcgcccgttgtgaagtacgtcacgcttcgaatggtaatcgctatcgcgttcttccttggatggccgctggatcagctcgacgtggtgactgcgttcctggtagacttatgcaggagaaggtattttgttcggtacctgatggtgttgagctggatgatgactgcgactgcatcgagttgctgaaggcaatttacggactcaagcaggcttcgcgagtatggaacgagactttcgacgagtatgttcgctccatcagatttcaagtttcggccaatgatccgtgcctttacatcaaggttgccgacggacaatgtgtgctactgctggtttatgtggacggcgtgctggtgaccggaagctccaccgacatggttgccgacgtcaagcgccatctaaagtcgcggtttgagatgaccgacagtggcaagtgtggtgtagtaccccgcggaagaagtgggcgcgccgggcgccggaggaagaaggcgccgggacgcgagtgatggacttcgacgcggctgatggaacgcgacgcggattgatgggcgcgacgcagggccgagatcgacgggaaagtcggcgtgggtgatgggccgtgagacatggtgctagaatccagtgcgacgcgtaatcatccgacgggtcgaccagcgcacccggttctgcaaaacgcgccgaccctaacccccgccgaccaaaacgcgccgaggtaagatcttgattgcgccacgcaaaccaggttgaaggacggcagtgcaagcacgacagaagtagggataggcccagagcggtaggcttagcaagcagtagtacggagtagccagtagcaaggacataggatagggtaaggactcagtcccgaaatttctctgaaccacaaagacctcccgtcttctccgaggtaccaggggaaccaccaagcgccggcaagtagagccgcctcgatatcgcggccccccgtcgtttgctggttcgggtgctcaccccccacagacccgtgctggatcaaaggcacgttaaacgtataccgtttaggtgggcgcccgataacgcgctgcctaggcgaaggatcgcactggcctgataaccgccgtgcacaagaccccccgtgtaggctcgataacgccacacaagccccaggaaacgccggcccgataacgccgcacgcccaaggctcgacgccctacgacaaggaacaagcgtcaacacaagaacccccaactccgaagcctgctaagactggggcctgtatttcgaagatacgctactccaacaaccgggaataattcgctcggcgcgaccgctatccagacgcgccgagtttgtgcgagatcgcattcgcgagatttctgcgagggcgctactccacaatggtgccgcgacccgggaatactacttcgaatgacgggccaacgatccaagaggcatcggaggcaggtgcgcagtcggctggaaggtcgccgaccgcaagagagcacagtgagagacctatcgcgttgtggagctctgagggaaccttcacgacaggccacggggccagcgacgaccaggagggctacgaagaacagtttgccgttcccgatgcggctcccgacgaggcagccgtgaagggccgcgacgcaattcgcggtcctaccggtcggaagcctgcaaaggccgacgaccaacaacaacccaccaccaaggcagccacgaagcgcaagtcgcccaagaggaagaaaaagaagctgcgcgcgccggactcggcggaggagtcgccttccaagccgcaaggcaaggacacgggacgtcagtacaccgtcgaggaggtacggtacgtcgtggcgcgcacggagctcttccgtctgctagaacaagacccagtcttggtcttcctcaagcccatgctgatgagcaacttcacaggcctcttcgtggcgccggatttcgatagtctcaccagcgtcgcccacgccgcgccgactctcttccagatgctgcgttactcggggttcgtgctgggggctttcgagatggagaggctgtgcgattgggacctcaaatcttggttacgtgcgattcgcgtcatgcaggagcccttgacgattctcgccggatcagtcaaacaagacgcgacgagttccgtgccgagcccctcggcgggtccagcccagacttcgacgaccacgccctcgcctccacctcgataccaatcgagcgtggactccgacagcagtttcgagtcgcccaagcgcatgcccatgaaccggccgccgcgcgtcatgcagctatccgcggcgcccacacgcacagaggtgacgaaacccgccgaggaggtgcttcccaaggccttgagagaatcaatctatcatcaggctgatgcagacgacggtgatgaacaccccgcgctccgacacgaccgcaagtccgacggggccgaagccgccctcgaatcccacacccacggtggctcgcgcccaggaggcagcggatgtcgccatggagtcggtcagttcgcgttcttcgacgaggtccagaactcgacgcgacgcggacgaggaccccgatgacctgttcgacttggacatcggagtgccaagaatcgcggccgccgtctcgacggcgacagccggtggcgtagccctcgcccgcgtacgcctctcagcatcttccgagctgaaagagttctcgggacgggacgccagcgaagagaaagccagactgcggctcaacggtctgaagtccgccgtgcggcgcgacgggatgacgggcgaagaagtgtgcgggcagttcagcgatctaatgagcggccctgcgtgccaatggtatctccagtagcccaggaaggtcaagaaatcatggaccgagctgatggagcaattccgggtgcagtactgcggcaagggcgtgtcaatggccagtcgctactaccatgcggctcagcgccccgacgagacccctctggatcacttgtaccagctcaacgtcgcgggcatgagggccaacatcccatacgccgagggcacgactgaagagaagcgcgaacacgtcgagcatttcatccggacgctgaacccgcaggaggccgaactcgcctcgcgtctcacgctgatggaggtcgccgactccgaggcgctggagcagaagctgcgtgcccgacaacgtggattggttcaccagaaaaagactctcttcggctcgaacaagttccgccaaaaggcgccgaccccgccgactcagccggcgcgcgccgtgcatgcgattcacgtcgcgtcggacgagtacgactcggaacgcgaaagttgcgacagtgacgatcgccagtacgaccaagacgaggcggacgaagaacgcgccaagttgttcgtcgcgggacaggccccgccgggagagccggcgcgtcgcaacttcgatcccgacggctcgggacgcgaccgcccgcggtgccgccactgtggttcacgtcgccatgtcgaagaggactgctggaagttgttgacggacgtgtcagaagtgtggtggccagcacccgacggagcgatgcttgagggtgtgcaaggcctgcggtgacgtgcacgaagccggagaatgcccgatggaggagttcttcaaccaattgcgccagtggtttgacccgaataaacacgcgggaatgctgccgccggccgccgagaagatgttaaactaggacgctcgctggcttggaaaccagtacgagacgagcgacctgtttccgtctatgcatatgtgaccaagaagtcgcgagaggtggttcgtgagagcccgacttccctgaatgataatacatgtgaatccaacctggaacgtaccacgcaagaacgcgcgccgcgaatctcggcggtccgacgtacgacggacgacgagtttgtacgtgaaccagatcgacttgcaaccaggagagcgacgcaggtactggaaacattacgcaccgcacaagtggtacaagcaggccaacattcatggaaagctgaacaaccgcctgctgtgttattgctcgacacaggtgccgaggtgtccatcctggacaccacctttgctcgtgaggtaggctgcctgattgacacggagatcacgcaagagtgtgtgggaattcgtgatgagacatattacacggtggggagaaccagagtcaagattaccttggctgggaacttggtgtactacatgcacctgtgggtcggcgacttggtcggccaacacgcaatcctgggaatgaacttcatggggaccgctggagtgcgcatcgactgcggacggcacggcgtgcctccccgacgaggtgcatatccagatgatcggacgaagaccgctatacggcgcacggatgcacccggtcaacgtcaagacgcctgtgaggctcgaaccaggagacacgcatgaagtcttgctgaggccggatcgaaacgcaccgttcctgtgggtgacacgggcagagtcgtgggtgactacctttgtcaaggggagagtcggaaataaaacgtacctgcgtgtcacgaacatcggagacgcagcgataaccctcgacgcgcatgaaacgcttgggtggtggacgtcgtctgacggccagcctcggaaccgtggattcgtccgactgggctccacccggtaccagcagtggcagaatctggcgtacggcgcgacgcgcgacgcggaggagaactggatcccagccgagctcgacggaccgatgacggatcgcccctcatacccgacgcctaaagccatcttgcgcccggagccgagacaactcgggacgcgacgcgccgtgaccccagtgttggcggctgtcgcggaagcgccgaagggaaggggggtagacttgccacccaacgaccacaagccggatacggacgaggaggcggtggaaagcgaacccgatattcctccgactgtggctggaagcgctgcgatggaagaatcgccggagtcggaactcgctgagccaaaactcgacggaccaaaccccgccgagccgaatttcgacgaggcgaaacctgatgagcaggaggaagacgacgcggtcctcatccacgaggggtccgacctcttcgtagaggatcttgagcctgagatggcagtcctgccagacctctcgctgaccgccgaagtgaagatcgaggacttgaaggtcggcatgccgactggactcccgcccaaggaagccgcgagacaagaaacgcggctacgccaaatcatctggaagctacggaagtggttgatcggcaaaggcaacgccttgccgccggccgccctgggtgttgtctgcgacatcgacgtgggcgacgcaaaacccgtcgcgcaacgcgtccggaaaatcccgccgcagtttcgagagaaggtcgccggcttgatcaaagggctgctgagcgcgaggatgatccagaagtcgaagtcgccgtgggcgtcgcccattgtcgtgatcataaagaagaacggcgtcgatatccggctttgcattgactacaggctcatcaacgggctgatacggttgatgatttaccccatgccgctcgtcaacgacttgctcgaagacttggacaagtatctgtggtactgctccctcgacatggcgagcggcttctgggtcgtccccatgacagaccgggcccggctcacctcagccttcatcactgtacgaatggctgcgtatgccgttcggcctgtgcaacgcgccgcagatttaccaacgcttgatcgacaacgcgctctacgggtccatgaagctgtccccggatggcagcactcgggacgtctttgaagacggcgaaccggtgaagccaggtattcactccgttctgggacggaggtcgtacatcgacgacatcctcatcgggggtacgtcgtgggacgacctgtgcaagaaggtcgaacgcttgctggatgtctgcgagcagtggcacttatccatcagtgtcgagaagagcgagtggggcatgtccaaggtcgactacctacgccaccgagtctcaggactcggtctcgaggcgaagccgaagaatctggagtcgctgacgtcgctcgagttcccgcgcaccgtccagtccgccagacgacgacggttcggcgcatggctcgccccgaccgactcattcgacacctcgatcgacgcgatcggcggcctctcgccgtaccgcggcctccccggatgccgtccgccgaattgcccgcttggaagatgagctggcatgcgcctaagcttcccgatcgactatgatccgcgaccgggcgcgccaggacgacaccgtgcgcgagctgaccgcgaacctgcacgacttggagcgccaccgctgggtgcaagaagaagatatccgccgccttcagacggaagtcagcgaccttcaacagtgcccagggtcagggtccgcagctgatccaagacctccgggatcagatagacctgcaagccgccgagatccaggatctggatcgccaactgacacgcgctcaggccaatctcgcgactgctaacgccgatcgtgatcggctggaccaccagctcgatctcgccgcggcggatatttcggatctccgatcccaggtttctgggcaagagcgcgagctagacgaggtgaaccacgagctagatcttacgcgcggcagcctcgatggggtccagactgcccttcaggtggccgaagcgaccgtggcccagcgaggtcacgttgcggctgcggccactccggccgttccgaccccgacgcctcccaccggacccacgcccgcctcggatcaacttcaagctgccctccaacgggtaaacgaggagctggatctgatgtgtaccgcccgagataccgcgagagaccaagccaccgctgccgtgagagacgtcgatcaagctcatcaagaccgcgatgtggcactccgagagaacgccgatctccgtacgtaagattcccataccacctatcccgttgtcgatcactgttcatgctgtcgctgcgctacaggatcgtgtctcgaaagtgcgcaacaggtgatccgggtccatgacgcccaattcgtcgacgtccagaacgcctacgctatgttgcgtcacgccagcgatcgatccagcaaggatctcgagaatgtggctgacacgttgtctcgcgtagctcggtggatcgggcttcgtcagtgcgcgccgatcacacctggccgtcgcagccgcagtcgctcaggagctccggactctaccgggcacatccacaagcgtgctcgatcggtgcctccaccccgcagtcgatctcagagtcggtcgcccgcccggtctccctcaccgtccttctcgttacacggtaacgatgagggacttcctgctgaagatcagcctgcttccgatcccaacaagcaacgggatcggaccaagacgggtccggctcgcaacctcgatcttcgcaaggaaattagtcggaagaggggaagtcgtccccggctagatctacggccgacgaagaaggaaccgaatcggaggggcccgatctagagaccgacgaagaagaagacgagtcggaggggtctgatcaggaggcgctcgcagccttagctcggtcccgatcggaggcccgtcgccgtcaatctgcctcgccagcccgtacccacacttcgccggctcgctcgcgctcgcgctcgccctccgtcatgtcaattcactcccaatccggaccggctcactcccaatcgtcccacggaacgcatcagtcccgtcatggttcacctagatcgccgccgcccggtactccacctggatcgccgaggcgtcgtcctctgatcccgccattgttcccgatcggcaccatgatcccgggtttcaacgcccccagggcactcgttcaggctgatacggacccctggccttcgatcctgctaaggcagctacagatcacagccatgatcttgtcgacgctgacccaccatcttctcctacccgaggggtggctcttcccgctcgccgttcggggcacgcacagcctgccaccgggatcggcgatcgagacgacctgatcaccggacccaacattaccgcgttgatggccgatcgcccctggcaggtgctgcagaacccggccaacccgttgactttcgatttggcactccatcgaggcgccggcactcaattgggtcggatcgccaccgcctaccttcaactcgaagagcagcatcgccaggccttctgggaaaccactcattatctcccgaccacggccgcacagcatcgggacccgatcgttgagcaataccatcgcgatcgccgagcccgacggatccgcctcgatgatcggtggcgccgactcctcgacgtgacgctgcccatgatgcgagagatgtgggccgacgtcgatctgctgctggacccattcttcttgcagatcccggtgcgacagcggggtgctgtgacctggtatcccggtgcggtgtctcgcgctgcgaatgctggcaactccacccaacgccaaggtgaaccgaccgacctccgaacggccctgatcgaggccgacacccatgatccctggcggaaccacacccccaggaccatccagccccacgcctccgcaacaagttcaaccccaacgtcggcgcccagcaccagccgtgacatgatcgccgtctctgcgatcgacttctgcaagtagcgagccagtcgaccattacacccccagagtcggagcgactcagaggccgatcttccatacgcgtaacgcgaaatattcagattaatccattccatcgtaacaatctacattcttcctcgatctcccactgttccccgtcaatccattcgttgctagctcgatcggccaggatccgtcctcataccttcctgcactcgctccataaccatccgatctgcactcacgtacacacattcattcatatacaacccctcctccgatcaacggcctccccgtcgatccgtcatccctctcgctcaccaaggtgacccgctcaccctggtggcccgatctcactcctcctcgtgagactgcatcgcgctgaatcggttccggtacacgcgatctcgaaggaactcgtacaataacgctccgcagttgagatcagcttcgtcgacccagtcaggctcgtcgtaacccttccagcgtaccaggaattctcgataagtccggccgtaccgtgtccttcgacccgtccgcatatccgtgatctcctctacttcgtactcattcgcgtctcgatctggggcccagctatcctccggaagtaagacttcgtcgaaatcaagtcgatctgcttcgtccaccgtgagcgcgatctgcggtcgatcggggaagtccctgaccaacttcagcttcgaaacatgcacgatcgggaacaggtgatagtccgtaccagcgatctgaagcttcatcgtatactcgttcaccttctccgcaacacggaacgggccgtgccacaggtggaccaacttccgggcatacccctctttcactcgatccaggtacagccacacctgaaatccagcctcgatcgagtgtggtcgaacttcttcattgtgtcgatcggcccgatccgcgatcgcctcgtgtaggcgagcattcacctgacttcgagcctgatcgtagtgcctctggatccgataacgccaccgtagaggattccgatcccgagtacgagtactacccaaaggtatcgtcgcctcgagcgtcgatcgaagatcccaaccatgcaccagataaaaaggggagtctccacctactcgatcttgagccgtgttgatcgcgaaggtcaatcgctctgcgtagtcatcccaatctctctgatccagatcctccacgaacatcttcagggctctcgtcgccgtctgtaccattcgctctgcagtatcgttagcttgaggtcgatatgccatcgtcgctcgctaacgcatacccagaatcttgttaaaggcgcggaagaagtcggccataaatcccggttcgcgatcatgcctgctcacctcgctagcaccaaatcgccggaacacgcactcttcataagacttggcgatcgtctgcgccgttcgggacgagctcgccttcgcgatcacgtatcccgtgaacagatcgacccagatcaacatttccgtattacccttgtacgacttgggtagcgaaggtatgtgatccatcgctatgatctggaacgggtatgtcgcctggatgtttcccggcggctcgcccctgatcgtgggtcgtcctttgccggtctcgcagtcggcacattcgccgacgtacttctgcacacttctgaagagacctctccagtgaaagtgatcgcggatccgctggtatgtacgcccgatcccttggtgtccaccttccagagtggagagatagtgatgcaagatatcttgatgcagcgtctctggtgcaaccagcctcatcagcccatctcgatctgcctccgatcgtttggagggtgggcaatagaacggcagattatcaccgtcgatctcataatccgctgcgaggttgccaaaggatcgagcctcatcctgcgtcagtgcagccacatctcccatcaggtacttcttcatacccgcgatccacgtttcttcatcttgagctcgacgaattcggtcgatccgcaaccctcgcacgaactcctcctgcatgacggtcgggttcgaccgtgatctggcgcccgatcgggtggtcatcggtgatagtcgggcgatcgactcatccgatcgaataaccaggatctcatcaagtcggttcagtgtcactagatcctcatgatcgacctcatcctcgacgacgacgaccccttcacgttggagtgctgcactggccaggctgtctgcactcccgttccagtctcgtttcacatgtaacagctcgtgatatggccagttccgtagttggtccagcaccttctgcttcaacaatgtcagcttaggtgctttgcagtcgatttcgccccgtacttgccggatcaccaggttggaatcaccgcagaccaccaaccggcctcgatctacgccgtcaaggaggtcgaaacccaacaacagaccatgatactccgcctcgttaatagtcaacccttcagcataccccgatcgtgccttcaccacactccattcgggtaacttccacaagatcgcgctgtacgcgcccccgcctcgcttgacgcgggcggatccatcgaaacttatcaccaggtgctcttcgtccgcacgtacagtcgggatcggtgcttgaatcttccgccggggttctttcttcggcgcgatcgcgatcaacgcgtcgtccatatccgatcgaggcgtaatactagcggcgatcgcccccaatatctcgtcctctcccttggtgcacttcgtgatctccagtgtgtcgtaatgcgggttgaaggattgtgaggcgatggacccggaggttacccgaaggtgacccgagagtgagccacttgaattatgggacaccctcgctcggcgtcccgtatagaaggccggcgactgattacgaaacccgatggcgtatttacggagatccagaacggggaggcccgtaacaaggacgatgacaccgcacggagacagcagatgacgtcatgaggtaaaggcgtgcagcatactggttggttggttggccggcagacgagctgccggtagataggcagttcagttcagaatttccaacaacgagacaaggtacttcttcatattagtctttgtgttgtgtggttagcgcctacgtgtgtactgtgactgtttcctacctacttgcgaagtgtactcggggttctggattgatttggcctccccggtaaccttctagtagcgtagtgtgttgcattgtctggactcaggagatcagctctcagtgttcgacagtaggacactctaaacggtttagtaaggtattggtgtgcgtctcgcactttggtttggacccgcagactagctgcggcaggagatctccagtagatctcgtacgtattgtacaacaagttgtcgtacagtgggaagagttacctcgctgtacaaatgcatccgcgacagagttaacctaagtctctgcctgcgagtgtaaggaaccccatattcacacacgtcttctaggaattacgctagataaagatccgagtcttgctacaagggtacacaaggtgaggcctagagatctcgggactagttctcgttgtctttgggtatttggcttgcaggggtaaccccccccccgtagttgcgtggcaggacacgtgtgggagtttattagtttttatctgagggactccaccacaatggtgcgcgtgcccggatctactagtccgaaaggggacgtgaaggtgaagggtgaggtgaggtgagggaagacggaactccgctgggaccggcggaagttaaacgtgaaaacactaggtccaccgacggacaggcaatggggacgcctgagccgaaggatttcgtttacgaagagaagttccccgttaaggctccgaaaggagccgtccgggactcggtccaaaaaccgagttccattggacctgctgctaagcgggaccccggcgtcgctgaaagcgaggtcgaaacctggagcgcgagcatctgaagggggtcatccgcgaccccgctgcccgaagcgatgctctagacgctgcgatggactacatggaagtcgaagatgcgaagaagaaagccgagaagaaaacggagaaattggagatctcggcgctagcggtccatggccccagcaacgacactcatgatgaagacaaacgatttcgtgaagctgaagtcaactacttccgtccagagcttgcgttcctgctccagagagatccgctcctgcgtaagttggggctgacgatgccatgggctctcacgggtccagttcgcaacccgcgcacgctaacaatccgagatccgcttcacgccgtcacgatgctgttctccgtgctcgaagatgctggtttcaaggtacatgaacaccggatctccaccgatgtacgcgattacgatctggaaaccgccgtccttacgctcgcgcgggtgtacgcagtgttgcagaagctcgtcccgagtgcagatgactcatccgcgccgttgccgaccggagacctcacacctcctcggttggacgattcgcggatctccttcaagtttgaagatgacggtgacgctctcatggggagcactacctcaacctagaagcctccaccggccccacgtgtgtcccgccgagaacgacgtgcgcaagggaccccagcgatcgctgcaaacgatgtaggacgcgggaagtctgcgcaagtgtcaaatattgcgcagactcgcccagcgagaggtccacgtgggaggatccaggaggctcaagaggttgcaacagagcccgatcgccccgcggtgtggctgaagaccttctttaccagttcgcgaacgagcgagacgagcctgaagacgttgagatgcagccagtcactgcgtctcccgctcagccacgtatcgagtaccaatcccatacacaaccggaataccaaggagatctccatgacctatccgatgacctcggctatgatggaggtagcggaaccggaggtcgtgtcgcagctgtgtccacggcgactaggttgcgagcatcggctttgtccgaactgaaggacttcagcggcaaggaacatgacgaagaagccgcccgagcctggtccaacaaggttagaacggcttccgacgggatcagatgcagccagacgagatgtgcttgacatttgccgatttgatgatagaccctgcgcgcaattggtattaccagctgagccgcaccgctcgcgcgtcgtggactgacctgggtgaacagttccagatccatttttgcggtgaagggatctccctcgtgcgcaagtactaccacatgcggtgcgggagtcaggaagacccactggattactgataccggctgaatctggccgggatacgtgcaaacctgaagatccatgatggcaccaaggaacaacgacgtgaacacgtcaaccactacatcgatacagtccaagatgacaatctcgccggatctctggtagtgttgaggctgcctgactcagaagctctcgaaggcgtcctgttggccatgcgacgccgccaccaacgtcgcaagattgagacccaaggttcgaaataccgccaaaaggctcccgcccctgcagcctcctcgagggcggtgcgggttgtgactaccggtcgcggacgccgcggagatcacgaaggtctcaacgagttcgagggcgaatcaaacagttccgatagcgaatctgaagaagaaagagcgcacgtgttttcggcagctaggacgcctacacagggagatggtgaacagccaggggcgcgccaagaccgcgaagaccaactggggcgcccgaagtacggcactcgatgctcacactgcggatctcgcaagcatacggatctcgggtgctggaaaaggctcacgtgccagaagtgtggacgcatgggccatcctaccgacaagtgcttctacgtctgcaagtgctgtggagacgttcacgaagcaggtcagtgtaaaatcggcgacttcttcgatgctgttcgccaatggtacaacccgactcgccatgccggactgctgttcgagagcgtcgagaaggcgttaaactagaccgctcgccaggcctgaacagcctggtacgtgacgagcgatcgaagttctgcatttatgcatatgttcagaggaaggcgcgagtgttagaagacccaacttcctgtcatgcggtgaatacagccagatctcttacctcggatgaagatgactattcgcgtcgcccttgtgtgatggcccttcgactgtcgccgggtgaacgccgaggttactggaagtattacactccgtccaagtggttcaagcagtcgaaggcgaccggtgcggtcaacaatgtccgtgccgtcctactctttgatactggagccgaattgtcgataatcgactctacctttgcacgtaaggtgggttgtgaaattgatacaacacagacaatggattgtgttggtgtgggggatgctgtgtaccgcacagaaggccgagcagaagtcaagctcactctggctggagagttggtgtacaagttccgtgtgtgggttggagatctctcaggacaagacgtcattctcggcatggattttatggttcctgcgggggtgaggttggacctggctgacggaacgctctgtctgccggacgaagttcgcatccagatgaccgaccgtaagccactgtatagcagcaaggctgacgcggtctacgcaacgggattccatgaagtcggtcctggccaatggacagagatctcactcaagtcccacaacaagcggtttgaactgtgggtaacgagaggggaaaaatgggtgatcacggtggtgattggtggattcagtaacaagtcatacctccggatcaccaacatcagcacgagccgcctggtactggatcgtttggtgtgtttggcaatctggttacccgttggacagatcccgcgtcgacctggattcgctaggaaggattcaaaccgctatcgggagtggcaaacacttgcgttcgaagcagctgtggacactggagatgcaaacgaagcggaagttgatgagtctggaccgctggtcgagcgtcctagctaccggactccgactgcgattttagcacggcctccacaagtgaagaccgttgaagcagcatcaacgtcagaagaatgcgcgcgactcacactggatgacacacatcctcaaatgcagctgatgaaaagttcgactgatccgactagggtgaccgaaaccgaggaggacgtgatctctaccgaccccggtcaggtgatctctggtatggacagcgatgactccagtctaccgcgtacggaaactcacgcaggcgaggagagcggcctatcctttacgaacagtggcgaaacaccggtaggcttggcgtcgactccggcaaatgtggctgaggccgagctccgcaaggagttcccagaatatacccctgacctcatgccacaatccaaaatacacgccgcggccaccgaggaaatggttcatcgcacgttgtcggtcatcgttgaaagcgactggagcgacagctgtggctgtgcgtccgatagcgctgagtctactggtagctggggtagttttgactggcagaccgacgacgagaaagaagaggagccggtgagcggaatgcttccagtgacccaggtcgaaccaagccaaggcggagatgcaaccgacatggatgaagcgaagtatgttcatgaaggggtcgatctcactgcggaagacatcgaaaaggagatggcggtgttaccagagatctccctgacggcagaagttaaaagggaagatctcaaggtcggggatccaactgagaacacagcagaggagattgatcgtctgcgtgatatcatttgggagcggcgtcaccttctcatcggcaaagggaatgctttaccccctgcggcgacgggggcgatctgtgacatcgacgttggtggtgcacgaccggtggctcagcgttgtcgccggatcccgcctcagtttcgtgaaaaggtgttccaactcgtcaaggggctactgggggcgaagacgattcggatctccacttctccttgggcgtctccgatcgttatcgtcgtcaagaagaacgacgtggacgtccgactctgtatcgactaccgtctggtcaatgctctgacacgactgatgatctaccccatgccgttgattgacgacctcctcgaagatctcgacagtttgctgtggttctgttctctcgacatggcgagtgggttctgggtggtgagtatgaccgatcgagcccgagagatctccgcgttcattacgccgttcggcctgtttgagtggctgcaaatgccgtttggtctgaagaatgcccccaaatctatcagcggctgatcgacaatgcgttatatggcgtgctgcggatctcgcagggtcaagatcgcgcggatctcgtcaacattttcgaggaaggtgttcctgaagatcgatcgctgccgtcggtgctggggcgtcgctcttacatcgacgacatcttagttggagaaagctcgtgggacgaactgtgtgagaaggtcaagaagctcctagaggtttgtgaccgctggaatctgtctattggcgcggagaagagcagttggggtatgagcaaagtcgactatctggggcatcagatctccggtgaaggcctgttcaccaagccgaaagatttggcaagtctggaggcgttgaagtttcccaaaacgcttaaggctctccagtcattcctcggcagtctcaactactacaatcgcttcatcgaagatttcgcagtatatgccacagtgttgtatgagttcggagattccgatttcatcaagggtcgagccacaaacgtcagcggaaatcacgaggcgactgtgaggtggggccacgcgctacgagtcttcgataccctgaagttcaagatgatcaacgcacccatgctctaccattttgccccagagttggatcctgttgtgattgtgtacgcaagcaagtgggcgatctctgcctctctcgttcagtgtcgtgatggagtgtacgtacccgtcaaatttacgagtaggtcactgcggtctcacgagatcgggtacgacattgtggagaaggaagtattggctctgctaagaatcctcgatagctgcttcaccatgctgagtggtcgacacatccgagtgatcaccagacacacgactctcgcatggctcttccgtgcgaaaggcttgaagggacggctagctcagtgggcggcgctgctctccccccattcgctagagatcgaacgtttaacgaaaggcgaagatgagctactaggtttggttgccgccagtatcactccgcgcgcagagatggatgcagcgttggaggagatctctccgcagaagaagtcgacgagagcattggctatcccgatgccgacttttacgcccggagaaaacgtttgcgtcgtcagctttgacggatcgaccaagccgaaacgagttggtggagctttcagcgctgtggtatgggatgctcctggatggaaggctgtcaaggctgaatctggctatttaccggacctgactgtgaacgaggccgagtaccatggcctccttctcggacttcgtttgattgccgatctccagatcgaccgtctcattgtgtgtggcgactccaatttagccatccgccaactgcgtggagagatggagtgcaagtcatcgggactccagctcttgcgtgagaaggccagagtgattttgcggtcttggccgcaattgcgaactcatccacgttaaacgcgattggaaccaacccgcggatatgctggcgggacaggcgctgcagcgtggtgccggggtagttgtcgagagtcacaccgattacacggacctcgagaccttgaatcgactggacgagctcctcaagacgcgcgaagaacgtgacgcccatccgaaggtaggcgctgtcacgcgaagccgatctcgtactgtcgcaccagccgtgttgcaggaagacgtcgtcaagcagctgcgcttggaacgtatttgccgtgctcaaggcgaggaggtgtggatctggtcactgaagtgtttcctgcacggtgatctctctcagatctcgagccgtcaagccaagacgtgcagtaaactggctgacagttacgaggtcgacgagtatggcctcttgatgtactgtccagtcgaggggcgcggtggtgatatcgaggaccgtggatctatggtgaaactggtaatgccgagtacactccacgaagatctcctgcatcatttccacacaagtgtggagggaggtcatcagggagtcagccgaacattccaaaagcttcggaggcatttctactggcgaggtacgttccgaagtgtgcagaagtatgtcggggagtgcgtcgactgcgagacgggaaaagaaaaacccaccttgcgggggcgatcgccgggcaatatcgccgctaattatcatttctaggtcgtggctatggatcatatccccaccctcccgaagtcgttcaagggcaacacagagctcctagtcttcgtggatctcttcaccggcttcgttgtggcaaaggcaaacgcggacaggacgcaccaacagtggctgaggcatacgaggaatgcgtgtttcggcggtacggagccagcgaagtaatcaggcacgaccaggaaccgagcttcatgtccgactttttccggtcgtttaatgcgctgctgggccagcgtcagcgatctacgctcgcgtatagacctcaagcaaacggcacagcggagcggatggtccagactatttccagatctctgcggatgtacgttgaagacgagaaccaacaggactgggataaatatgcggagcagttggtgtttgcgttgaacacatcgcacgaccgagtacacaaggacacgccattctttttgctgcacgggtgggaccctaaaacgactattgaggcatcgttggctgttggagggaccggaagccgagatctcgacccacagaaatggaggttcaagatccaacgccaataccaacgtgctcagacagagactcgtcgtctcctcgccgaagctcgtgagagtcgcgcggaagcccacaatgagaacgtaccggagtcacccattaaggagggatcgcaggtgtggctgtacctcgaccgagtcaaggtcggatacgctcggaagctcgctcacatgtggcataggcctttcagagtcgccaccacggcgagcgactacgctgccaagctggaaatcagcgggactgactaccgactgttccctatcgtacacatctcgaagctgaagctggtccgacagttcccccgaacgacccgccgaaaatctcactgttgatgaaagcgaacgatttgactttgacgaagaacgtctccccgaggatagctgggaggcacaaactcgcggtgacaacgagtatgaagttgaagagatcttggatgtcaagacggagagtcgcacccgctacggtcgacggctcaaggaatatttggtgcgttggaagggccacgcagagacgaattgggtcaaggaagaacacctgaactgtggtggtctgctgttcgacttccagcagaagcgacggagccggcagaggttccatgtgatgcaatcgcgtggagaggccgacatcgccgaagagtgaggcggtgttggggggtagcgtggtggacgctatccgtaatggcggatggtatttgttgcacatttacatttgattgagtggaagaagaaatggagagaagatcacgcgacagaacggagaaacgaggttagttgtgatgatctggtcggacattagaattacgacgaacgagtactcgggggcgacttggagatccagcccggagccgcagtgcaggagacaccgagggcgtgaaggcgtggtcggtggccgtcggactaagtgcagtcctacgcctggagtttgtgctatggccttgatcaccacaaatcacttcccagaatgcacggcgacctacgacatgccttcacatctccagttggggagatctcccagtcatgacattgactgtgtacaattaagttgtggggcgggagtgannnnnnnnnnnnnnnnnnnnnnnnnnnnnnnnnnnnnnnnnnnnnnnnnnnnnnnnnnnnnnnnnnnnnnnnnnnnnnnnnnnnnnnnnnnnnnnnnnnncaggaaccgagcttcatgtccgactttttccggtcgtttaatgcgctgctgggccagcgtcagcgatctacgctcgcgtatagacctcaagcaaacggcacagcggagcggatggtccagactatttccagatctctgcggatgtacgttgaagacgagaaccaacaggactgggataaatatgcggagcagttggtgtttgcgttgaacacatcgcacgaccgagtacacaaggacacgccattctttttgctgcacgggtgggaccctaaaacgactattgaggcatcgttggctgttggagggaccggaagccgagatctcgacccacagaaatggaggttcaagatccaacgccaataccaacgtgctcagacagagactcgtcgtctcctcgccgaagctcgtgagagtcgcgcggaagcccacaatgagaacgtaccggagtcacccattaaggagggatcgcaggtgtggctgtacctcgaccgagtcaaggtcggatacgctcggaagctcgctcacatgtggcataggcctttcagagtcgccaccacggcgagcgactacgctgccaagctggaaatcagcgggactgactaccgactgttccctatcgtacacatctcgaagctgaagctggtccgacagttccccgaacgacccgccgaagatctcactgttgatgaaagcgaacgatttgactttgacgaagaacgtctccccgaggatagctgggaggcacaaactcgcggtgacaacgagtatgaagttgaagagatcttggatgtcaagacggagagtcgcacccgctacggtcgacggctcaaggaatatttggtgcgttggaagggccacgcagagacgaattgggtcaaggaagaacacctgaactgtggtggtctgctgttcgacttccagcagaagcgacggagccggcagaggttccatgtgatgcaatcgcgtggagaggccgacatcgccgaagagtgaggcggtgttggggggtagcgtggtggacgctatccgtaatggcggatggtatttgttgcacatttacatttgattgagtggaagaagaaatggagagaagatcacgcgacagaacggagaaacgaggttagttgtgatgatctggtcggacattagaattacgacgaacgagtactcgggggcgacttggagatccagcccggagccgcagtgcaggagacaccgagggcgtgaaggcgtggtcggtggccgtcggactaagtgcagtcctacgcctggagtttgtgctatggccttgatcaccacaaatcacttcccagaatgcacggcgacctacgacatgccttcacatctccagttggggagatctcccagtcatgacattgactgtgtacaattaagttgtggggcgggagtgatatgaaatggagtcgaagccggtgtattacgatgtcgataaagaagatgcatgctcgaggagactacccactagctacgtacattggtgaaggaagaaatgtcggacgctggagatttccgggggtcctcctaggtctgttcagctgactcaggctaggcgattgacgaggtcgccttgaacttgcctcgaaggcgcgtgtggatgggttcgttcatcgatgggtgtttggcacgagcgttccagtagaacaggcgccacggctccgcctcgtcagtcgttcgtaagacgtgtaacagatctccagaggcaccagaagctcccttagggaaccacgggcacgttgcgatcagcggcaggaagaatggctccagaagaatgtccaagtcgcacacataaaccttgcacaggcgggccacctcttcgaacacaggcagcagcatcttcacaaagtgggatctccgattcttacgatccgaagtgaacttcacctcccaagactcagcgctggccttggaaatggaaatctcgatggagtgggtgatctcccagaacacaagcgcgccacgattatcgttccgagccagcacatcgcggatgatggccggaagaggttggaagcggggatcaccaatgtcgaacgagactgggtcgggcatgttatccaggaagatcttccagggactcgctttgtataaagcttcgaccgaggcttgtggccagggccgatagtcagcagcaacggccagcttccccttcttagggttgcataccccggcgggtagcagccagtcgcgtggtaagaacttcgaagcgaggtctttggctgtaagctggtcaaggcggtgacctgcaacaacctcccacagccacggcgtgacatcggcagggcgcgcagcttcgctggactcaggtggaattgcgtgcgtgaatgggcttcgggctgatacagagatccacgggctgtcagacggagatctatgaaagtcgcttgtctgacaatgaggaggagctacgtacccatcgccgtagaggaagacaactcagctggcgctccctcggtagtcgcaacggcgcgctttgcgcgcttcgactgtgacgttggatcagaagagagatctccacttcgctttgccgagccagacgggagctgctgcgaagatgttcgcgctggaggatcagaggagacaaggctcgtggccgttgacgccagtgtggcaagagacgaactggaagaggccgacgccacgcatcgttccacctcaggttgcggagtcggcgcaggtaccagattgatcaagttgcgcaacgctccaaggtgttcctcacgctccgctagtttgctgcggagatcagcagaagaagcctgctccttcagcagcgactgtcgactcgcatccagctccgcctgcaagtcgtcgcgagcgagggaggcctccgctcgctctcgttctacaaagcaataaacgcacaggtcagcacaagagtcaacccgccacattagcacgcgcgatcatgacctgcagccactgcgcgatcctgagctgttgcgagatcagcctgacgatgctccaaactgttcttgaagacgacgttctcacgccgtagaacggtgttatgttgagtcagccgagtgatcttcctctccaactcctccagtcgcttcccagccaccttatgccgctgtgcgagatccgataacgctgtcgctgtggagatcaaggcgttagtgatgcaacatcaacaacctcagcacttgggacgacttaccaccgtcttgcgccttcttcgacgccgccgccgcttctcgtcgtggtgcttctgcgtccttacgagctttggacgtatccaagcgaagggcgtccatccgtggcgctgctttgttgaccagcgtgcgcgattgcgccaactcggtctgcaacgtgtcgattgtcgcctccgcttggcgcaattgattgcgagatctgtctcgttcggcattggatcgttgcagggcacgtcccgcgcgtccgtcactagtccgatcatcatcattgccagcttcgctggcagccaacagtcggccacctggggtcaccgatgcagtgggaggaggggtccaggtagccttgatatctgccagctcgatcatccagatctccgagggcgatctccaactgactggggacgacgttagagggcgatgctgcagcggacggagtgacttcatcggcatcagctgagcgagcggcgacccgtgcgagatctgcgcgtacttgttgttcagcagcttcggcttgctgacggcgttctacttcggtgttcagggcctgctggagatctcggagacgaccgtcggcttcgttgcgcacgcgttgaacctccagatcgcgatcatggatggatcgatgaagacttgcagtgtggcgaccagatgcttcaagaagatcctgggcgacgtcaagacggccccggagatccagcacctcgtggtcgagggctgcggtgacttgagcagcctggataatgcgcgcgcgttccgatagagatggctgcgaaccggagtatggagccgcggccggtatagatcgaccaagggagtgataggcggtgcaatctccgtgcctgtaggtcgacgacggggcagcactcagcagagggacgccggcggccgacgacgaaggcgacgacgtgggtggagaagcagacatggtgcaggagctctacgcgtggcagcaacctgctcgatagcctcacgcgaagagagggcggatgtcgtaatgcgggttgaaggattatgaggcgatggacccggaggttacccgaaggtgacccgagagtgagccacttgaattatgggacaccctcgctcggcgtcccgtatagaaggccggcgactgattacgaaacccgatggcgtatttacggagatccagaacggggaggcccgtaacaaggacgatgacaccgcacggagacagcagatgacgtcatgaggtaaaggcgtgcagcatactggttggttggttggccggcagacgagctgccggtagataggcagttcagttcagaatttccaacaacgagacaaggtacttcttcatattagtctttgtgttgtgtggttagcgcctacgtgtgtactgtgactgtttcctacctacttgcgaagtgtactcggggttctggattgatttggcctccccggtaaccttctagtagcgtagtgtgttgcattgtctggactcaggagatcagctctcagtgttcgacagtaggacactctaaacggtttagtaaggtattggtgtgcgtctcgcactttggtttggacccgcagactagctgcggcaggagatctccagtagatctcgtacgtattgtacaacaagttgtcgtacagtgggaagagttacctcgctgtacaaatgcatccgcgacagagttaacctaagtctctgcctgcgagtgtaaggaaccccatattcaccccttcatattacacgtcttctaggaattacgctagataaagatccgagtcttgctacaagggtacacaaggtgaggcctagagatctcgggactagttctcgttgtctttgggtatttggcttgcaggggtaaccccccccccccccgtagttgcgtgacaggacacgtgtgggagtttattagtttttatgtgagggactccaccacaagtgtccagggcgataggagtgcagccgggcgatcggaacagccacgccaacgtcgagtgtcgggtcaagacccggatcgatcgtccaaccagcatgtaatagttcaggtccaggatccgtaacagcgccagcacttctttctccaccacattgtaattcagttcattcgacttcagcgttcgactggcgaaagtaacgggatgatagatctggtcgtgctcctgcatcaatgcggccgagatcgcccagtcactggcatacacaatcacgaccggagtccgatcgcgatcgaagtgccgcaggatcggtgtcgtcgcgatcttcatcttcagggtcgaaaaggcacgatgagcacggatccagcgttcatcggctacaccgacttcaggaactgatggagtccgatcggggttcactggatccgtatccactaagttcgctacttgacgatccaggatctggcgcagatcggggcgtttcttcagctcggggaagtccacctcgcgcagttcgtacaggatcgccgcgtagatcgcgtaatcttccaagaaacggctgtaataattgaggctgcccaagaacgactgcatcgatcggagcgatccggggaacggcagatcagtcagagccgtgagatctttcggattggcctctagcccgtcgttcgacacccgatgtcccagatagtccaccttacgcatcccccgagctcttctccacactgatcgagaggttccacttatcacaagcgtccagcaggtgatccacgcgatcacacagctcgtcccatgacccggccgtcaccaaaatgtcgtcaatgtacgatctgcgacctagcactgatggacgcccggatcttctggttctcctgactcgaccaagtccgtagtgacttcacagtccgacgatcgcgggatcctggtgaacccatacaacgcgtcgtccagaagtcgctggtagatctgaggagcgttcttcaagccgaatgacacgatgtggaaacagatttttgtctgcacccatgtccgaccccatggatacgtggacccttcggtgagctggattggtcgcatgagatggagatccggtagagacgagtgtgacgtgtggattgtggatgtgtgtggagacttggtgggacccggcacttgcagcaagcatgggctcacaggattggagatgcgcccaccggatgagcgctcatattcggtggggagtcacgcatcctgtccgtccgccgacttccctaacggcaggataggcccaaggcgcgaaagtgtggccagcgaacgtatcctggccactgcctgcattggatcagtcaagttgtcggaccaccccactgaatcgccccaccagacatgatcacacgcgcacagaccctgttcgatgaagcctcgtgttgtccggaccggatcgtggtgcaccctgatggaaggtatggatcttggacacgaagctcggacgaagcggagggagggacgtcgcagacggcgggaccggagcgaaggcacttgaggggtagaatgaagattcgaaagtgattgaattgttggagcttacaccctactgttatagacacgcgaccctgcgtcctatcacctagtgcatctaatcaaccatcactcaccggtgttcatccaatcatcctactcgtctaatcatcggtggcgtaaacaacttaccgtaatcaccataatcaacgtgggttcggattggaccggttcgggttaaccggttaatgggtacaactggtacacagtacccaagaccagcaaccctcaatacacccggtgacggcgtaccgaatggagaagtgccacaccggatggggacggacagtatcgttcattcggtccgccccccgtgcccacactggatgtcgacgcaccaagaacaagtccagtgcgcgctgcgtgtgttcacacagcggcgtcgatccgaaccggatgagaccaagatcccccaagatccacaggcggcaccgaatgagccgcagatccaagggagaggtccagttccaagacgaagagacggtgtatccagatacctccgtcatcatctgatgagtgtacccgaacaagtgtcgccgtcaacaagtctccgcataccgaaaccaagacgagcatctgaagaactgctaagaagcacaagcctactcaagacaagcgaagcatagtgaaacctactttaaagtcagcgaaatgatagaagatagctagccaaacgtaagatctaaacagaaaccaatttgccgaagaacacgcggacgactcggtgctcggggcagaagtaacaccccgactttgacgtcttcaagagccctccaggagactgcctgcgcgcggtctaagccagtttagggacgcttccaaggcctcactggtgtagcgagcactggtgtagtggggactcaaaggtaccaaggcaaagtcggcagtgactggggtttcgcgccccggagtgacctgtgagagctttatttcctatttgcgtgctctaaccgggcatccatttcatattccctactgtgtgtctttggtggttgaggtagtcacccccccagaccgaattgattgactactgtgtgataggactaaattttattttgtattgttccctcattctgtgagggtggtgcgcgtaagtgagtgtacatccagggctgaccagtgccttgggtgacggctccgaagttgactggtgtatagaccccccacccaagggtctcaaagaataagtggtggctgtatattttgtgacgtttagctcggcattgtatttctgtgtattggttattctgaattacggatctgaccgtggtccctttcattcggtctgaccttctgttcattcggtgtggtttatcccaggaacacacccagcagactttattctgtatcgcaacaactcaactcggtgaaatccggtccgccaaaggtaaacgatacctataggggttgacacaaggacacacgccaaacaccggaccgcattagtgcgattcggtgcgtccaagcggttccaggcccgggtcattcagtgtcccgtgggctgcttatcgcgtggacaatctctggtactccgaacccgaattcattcggtccggcatagtgcgctatacaccctggacgataaaggcgttcatccgcctcgcctcggctggtgcgcgtgcccggatttggttgcctaggatttcaccgcgagttgtttgtatattgattcggtcttaaggggtgtttctacagtctacctggactaacagtttggttatgactggaaggaagcacgtgaaggtggacgcggaggcggacgcggtgaggcgtcgcgtcagtcgcgtcgagggcaagggctgccgccggaggagcacaaggccctggacgacgttgtctgggaggctcggaaggctggtgctgggaagcgcaaggcggtcctggaagagaagaagaaggcgtcggcggccgttcaagatcaagcggccccggagtcctccgttctggatgcgcaccaagcaaaccaggatgaggctccggaggcggactcgaccgagtctgtgccggccggcaccgaatgtgtcccagacccggcgacgggactggatgagggtgagtccgcacaggatgatgaacccgcccaggcgtctgtgggaggcgccgatgaggttgagcccccggctgaggatcgattttcggactctccccagccggatgacgaagtcgagattctggatgaagccccgacgatcaagcatgaaggcccgctgtcgactgtccaagaagacggcgtactgaacgacgaagccgagacccggtctgcccctgcgccatccggtccggccgcgactgcccaagcacccgcgctcaagattgaagccccatccggtctggcgctctcggattcgcgaggacccgacgagaccacggcccaagtgagcgagacacaggcgaaggcgtacgtggccgaacaggtgcgccgctgggagcagcatcgtgaaagcgctgtcgtcctgctcaaggtggagtatgcctggcccgagccgacacccgacttcaccgaatggtgggctgccgcgctggcgacgtcgaagtacctgtcggaccgaatggcgatggcaagtcaagatgctgcatggatcgcggagctggatttggtacggcttgagctgtgtctggcccaggatgtcacgggtatcgtgattccgccgagcattctctcgccgcgcgagtgcgttgcgtccatccagcctctcctcttcgctgccagtttcaggtttcacaacctgatcccgatgtggttccagcccaagtcctccagggtcgcaccgagcctggtgcgctctgtggtcgaagacgtccaacatttcctcgcgttcgagctgatcgagtggcgcgagctggcatccggtgtgcccttcaagaccgtaccggatgcgccggacgttcaagacctgaccggaccgaatgctgggaacactggatcgacgccgcagcaagctgtgcgagcaccgatcctggactaccaggctgaagacaacgacggagacctattgatgtcggattacgaggctggactactgggtcgcgagtttgtcctgcgtctacgagtggccggactccggcggacacagagcccgcaagggtcgtctaccggcgaaacggattccaagcgctcgcagtacggaccgcctcgcccgtcgtccatccagtccgcatcgtcgatcccgtccgcgccgccgctgtccacaccgtcgctctcgtcgctcccttcgtaccacgcatccagcgagtctggacgcgcatctggtaccggagcgctggttcaatttggtccgccgtcccgttcgccctcggatcttgattcgagcttgttcggtacgacggccggatccaacgagtcgacattcagcgcggcatcgggagctcggcgtccagaggcagctcgtcttcgtcgtcgctgtggtccggacacgatgccgcgaggcacatgtccgcgattgggtacggacccatggtgatgaccgcgcaagcagggatgattcagtccggcactggcggaggaaccgtggagatcacccggagcgcactccctcggtcatcgacggcggtggatcaggacgatgtcgttatgtcggagtccgatcgcaccaccgtccggagtgaccgaaggtcgagagcgtcatccggtccgcgaacgacgtccaggcgcgagaagcggagtccgtcaccaagcgagtcggattccagcgaggacgaccggagtcgccaccgaagatcgtcgaggtcgaagcgcgcaccgagtcggtccagcagatcgagtcgatccggtcggtccagccactccgcgatgtccgtgatgtcaggggcctcccaagtcgcgctcaatacgatgcgccagactcaggaagcccttgccaggatggagctgaatcaggaggcgtccgctgcgagcacagctcgactgggtgaaggactccagaacgcgttccacgcgattcaggagctcgccggacgcgccgctgccctccaaggtagtcggcagaccggattgggacagaatgctccggtcccggagcccccgatccagtccggcccgttcccggtatcgccgatccaggagcacgaagtcgccgccgccattcagagcgcccgcaccgaggcggcgcgtctggagcgcgaacgcgttgccgcggagttcaccgagcgctggaagcagcaggaagcgcaggctgaagccgaccgagcacgctgggtcgaagacgtccagcggagactgaacgctcaactggatttattccaagagaaagtccacaaggttgaagctgagcgagagagggagcgaaaatcttcccggaacattcagcggtttcaggcccaccagttgcacaaccttcgtgcaacacgccaggaaaatccagctgctcaagcaacatcgggatgtcgcaagtgaagacagagaccgggcgtgcgactctgcacccaggtgcaagtgcgcctatccagtccgaccaggcgcccatcgggtctgcgacgccacgcgccgacgagcttctagcagcccaactccaagcgacgatcgatggtgttctcaaggcgcgagcgaccaaggcgcgcgccgcgcaggctgcgccggtgatgggcaagcaggatgcccccgcgaaggacgccaagaagccgcccatgaagggggaaggctccaaggacgcgagggacaccgggtctggggcgcacaagcgcccatccggtaggcggagccgcgagagcggtgacccctccggatctgacccggactcgagctcggatgacggctacgacgaaggctacagctccagcggctcggacgactcgctggcgaccgtgcccacgcactccacgtcggtgacgacacaggatggcaagacggtgatgaacttcagaccgtatgtgagctccagctcgctcgaggacttcgacgacaaggccccataccaggaacggacaagatggtgggagcgattcctcaccctgacggtccaaggtggctggacggacagcatgatggtctacgagctgcgtttgaagctgccttcgtctgcccgcaactggcgtcaacaactgccgaggcacacacgcgacacctggagtttgctgtcccgcgcgttcaagaacaagtactgtcggtcgaaggtgtccgattcggagcgatactataccatggctcagaagcggaccgaatcgaccctcgacttcttctaccgactgaatgctggggcgaacagggcgaatgtgaacttcaagaagtcgccgaggacgcgggagatgcacatcaagtggttcatccggaacctctccgaatcaaggttgcggtccagtctgaagagtcagcgcatacacagcatcgacgacctggagttcattctgcgtcagcatgaagacggctaccaggacagtgcgcgcgagagctcgtccagaccgcgcgacttccgcgcggacaatccgcgtaccgagaccgagatcgcgagcggtacagaccgaaacctgcgggacgtgcttacatcgcacagagcgaagacgaatcggatgaggaggatcgacacgtgcgctttcaggatgaagtggagaaccgcgcactgacgatcgcaccgaatcatgattcggtcccacccgctccggcacgaccagtcggaccagatccaaccctggcggtactgaatgaagacgttctgcgcaatgcggtgttccgtgtgatgacgggttcaggatggaagccgccgccgccggtgcggcagccaggggcgtcgagattcggtccgtcctccgcaccgcagtcgccaagaggaagtaattcggactggcacgagttctgcgagaagtgtgaaaggcctggacatcgacaggagaattgctggatggacatcgtgtgtgaccgttgtcatcgtcgaggacacccgatgcgggtgtgcaggatcatcccgtgcagaatctgtggtcggttccatgacggactgtgtggacttgcgaagaccgtggaagaactgaagaagctggcacaagaaggagccctgaaggacataccgaagaacatactggatcagctgctggatgacaaggcagatgcaggtgggcagttaaaccactaagcccgctgggtggggacccagtacgcgccgggcgtaagccccctgaattgtgtgtgctagcctatgtcggaccggagctgaggaccaacgaccaagataaccaccaacaatgcatgatttccctgagcaatgacgacccgattcagtctgatcaagttgacgaccattctgtacggaaccattctggatcgcgaggaccggacgggcagaccgaatttcggctggaacccggtgagcggtatggatggtgggttgatcacgaaccggataaggactcgcatgaggtggctacggtacatggtgcagtgaacgatttgcgactggagattctgttggacactggagcgtcggtgaatatgatcagtttggatcttgcgcgtagactcaagatcaagctcaaccgacacaaacagatcaaggtgtctggactgggtggcaaacccacctacatctctgccagcacccaagtcaagatcacgctcggtgcgagagtggtgtatgtcatggatgtctgggtcgcgaatatcggtgaaggtgtggacgtattattgggtatgaactttatgttctgtgctggagttcggttatgcatccgcgagggacttttgcagctaccggatgaagagcctgttctcatgtacggggacaaggtacagcgtcgacaagggatgaggttgccggtccaggcgccggagaccctgtacctccgacctggtgatgaagctgtcgtgcgcattcggttcggccaagccaacccgcaacgcgaagtggtgtgggccggacgtggcgaccgatgtgatggaaggtatggatcttggacacgaagctcggacgaagcggagggagggacgtcgcagacggcgggaccggagcgaaggcacttgaggggtagaatgaagattcgaaagtgattgaattgttggagcttacaccctactgttatagacacgcgaccctgcgtcctatcacctagtgcatctaatcaaccatcactcaccggtgttcatccaatcatcctactcgtctaatcatcggtggcataaacaacttaccgtaatcaccataatcaacgtgggttcggattggaccggttcgggttaaccggttaatgggtacaactggtacacagtagcaaccctcaatacgccccctcaatgcgaagtcccacgaatgccgagagccaccgtcagatccgtgtggcgtggtcccgcaagcgccttcgtcatgatgtccgctagcatcacagaagtctcgcagtactggagcttgacttcgccgcgtttgacttcatcgcggatgtggtggtacttgatgtcgatgtgcttggcgcgaccgtggttcactgggttcttcgtcatcttgatgcacgactggttgtcttcgcggatcatgagttcgggtccagtctcattagcggccgccagaatctcgcatagcaggcgatgaatccacttgccttcttggatagccagactgagcgcgatgtactccgcttcattgcttcttgcttccccagctcacaggcgcactcatgagcatgaacgtgtagcctgaagtggacttgcggtcggcgaggtcgccggcccagtccgcgtccgagtagccacgaaagtcgatcttgtcgcccggcttgaagcagatcccatgcgtcttggtgccttgcaggtagcgaaagatacgcttgaccgcaacccagtgttcctcttgggggttctccatgaagcgcgatacatagccaacggcgtacgcgatgtctgggcgcgtggcggtcatcaggtgcatcagagcaccaacagcttcgcgaaacggagcgttcaccttggtcgccgcgtcgcttggaaccagtcgagtgctcatgtccaccggactcaccacggccttgcactcgtccatggcgaagcgcttcaggatgtcgtccacgtatcgccgctggcacatggtcacgctgccgtccgggccgtccaccaactcgatcccaagaacaaacgcgcacttgccgctgtcggtcatctcgaagcgcgtcttcaggtcggtcttcgtgcgtgcgatcagctcgggcgaactcccggtaatcagtacgtcatccacgtacaccagtacaagcacgcagtgaccgtccaccaccttgatgtagaggcacggatcgaaggccgacgcttggaagccgatggagcacacgaactcgtcgaaggtctcgttccacactcgcgaagcttgcttgagaccgtagatggccttcaccagttccaggcagtcgaagtcaccatccagttcgacgccttccggaaccacgcagaagaccacctccttcattatcccgtacaggaatgctgtcaccacgtcgagttggtcgaggggccagccaaaatacttagcaatcgcgatcaccatgcgcagcgtcacatacttgaccacgggcgagaacatctcggtgtagtcaatgccgtacttctgcttgaagcccttggccacgaggcgcgccttgtacttctcgatcgagccgtcggctttgcgcttgatcttgaacacccacttggtatcgatggcgcgttgtccgttaggcaacttggcagctcgaaacacaccacgcagtcgcatcgacttgagctccgcgcggatcgctttgcgccagtgcacttgatcaggaccgttcacagcctcttggaacgtcgtcggctccgatagatcggctgctgcttccacagcgttggcactggcacgccaaaacactggaggcgtcgagtcgtcgtcttcatcttggtccccagacttttcttcttcgtcggggtcggctcggcgcgaggaggatacgtccggcgcactttcttcttctaagccagctcggtggcgaacggggcgcgatcttctggcagtgttgtcgtcgccactcggtcggtacttgcgcttccccgcctgcttgaagctcgtttggcgcggtccatcgttgtcgtccaggtccagcgcgtccaagtccagcacagcatcatcgacgtcttcatccgaagtatgcgtcgaaagtccaaaggtcgactcatcgaagttgacatcgcgactgataaccacctgccccgcctcgatgtcataaactcaatacgccttggacacttcttcgtagccgaggaacagcccggcgcgagccttggggtcccacttgcgccgtctttccttcggcgtcaggatgtacgtctggcatccgaacacacgcatgtgcttcacactcggcttggacttgtaaacgatcggagtcttgtgttcgatcttgggtgatggcagacgattcttcacgtagatggctgtcatggccgcctcagcccagaagctcttgtccagcttggcgtgatgcagcatgctgcggccaatcgtgacgatggtccggatggcgcgttctgccgtgccgttggtctggtgcgcgtacggaaccgtggtttgctgctcgatgtcttcggcttcgtagaaggccttgagcgagttggtcgcgaactcacgggctccgtcgtgccgcacaaacttgaccttcttgccgaactgcgtctgcaccttcgtgacgtacatcttgatgcagtcctcgctctccgacttggcacgcaggcagaaccccttcatgcatccgctggcttcgtccacgatcagcagcagatacttgctgccacccagtgactcttcttccatggggccgcacacgtcgaagtggagcagctcgaacgtgtcgcagtggcgcttgtcacggttgcttgggaacggtttctggaccattttcccttgctggcagccgcgacacacgcttggtccactcgacttggaaggtgccttcgcgtccttgatcatgttgttgtcgaccatcttgcgaaacatctccaccggagtgtgacccatacgcgcgtgtaagtcgaccgtcttcccactggtcgccgcattcgccgatcgctgaggcgtctggagccagtagagaccatccacgaggtttgccgtcgccaccacttgcttggcgcccttgtgcgcaatctgcatcttggtgctgtcgaacacgacttggaacagaccactcttgttgatctgtggcaccgaaagcagattcttgctcatgcttgggacgtacagcgcgttcttgatctcgatgtcgcgctcgtcgccgttgggcagaaccactcgttccacgatggtccccacacccatgatggccgccttgttgccgtcggccaccgaaagttcgccttcattccgctcaatcaaatgagcgaacttggccttgtcgttgcagatgtggtgcgttgcgccgctgtcgaccgcccacaacccggacacattcttgcccgtcgaaatgccacactccagtgagaccgcgaacgccactcgatcatagccgtagtcgtagttgtagctggcgtcgtcgttcctccactgggcattgttggccccgcgtccacggccattgccattgccgccgcgtcttgggccccgattctcgtccttctgcttggtccagcacttgtcaatcgtgtgccccaatttcccgcagtacgtacactggcgagactctcggtcggtgttgaacgccttggccgcattctccgtcttcaccgtcgccgtcttctcgccttgtctcttgatatgctcattcgtcagcaccttcacgacgtcttgcgatcgtagttcagcgctgctcatctccaagttcagcacgacgttctcgtagctcttggggaggctgcgcaacacacgtcctcatcctccatcttggcgccgatgctgctgagcttggcgctgatgttgaggacctcgttgcaatgatgcaagacgttgccgccttccgacatctccatgctgaagagttggcgcttcaggtagatgcgtccagccttctgcaaaccaccgtacagcgtcttcaggcgcgtccacgcaacccacgcttcctcgcagtcgtcgaccacatggtggtagtccgcgtccatgtggagcaacatcagtccgaacgcgatgttgctcgacttgacgtagtcgtccttggcccgcgagtccgtgaagctcggcgtcgtctcgcggttcacgacatgccacgtcgacttggtcaggaacacgccacgcatgtagcggttccacgtcgcgtagttgtccccgttgaacttgtcaatggagaccttggtcgaggcgtcttgggcagaggacatggtgcttgggctcataacctgatggaaggtatggatcttggacacgaagctcggacgaagcggagggagggacgtcgcagacggcgggaccggagcgaaggcacttgaggggtagaatgaagattcgaaagtgattgaattgttggagcttacaccctactgttatagacacgcgaccctgcgtcctatcacctagtgcatctaatcaaccatcactcaccggtgttcatccaatcatcctactcgtctaatcatcggtggcgtaaacaacttaccgtaatcaccataatcaacgtgggttcggattggaccggttcgggttaaccggttaatgggtacaactggtacacagtacccaagaccagcaaccctcaatagtccccttggcgattcttcgagcttgccgcattggcctcgtcagccggcgtcctcggcgtcatgcagagcttgaacagtcctttgccttcgcgagcgccgagcttccacttgagacccttcgtttccgcgaagcacccgtcgctctcgaaggtcactggcccgacgtccttggtgaagcggccgacggagaacaggttgcgcgacagcttcgggatgtgccacacacccgtgagcacacccttcttcatgccgcgcggtgtctgcatcgacatcacgatgtcgccgctcccaccgcctgaaccacgccgtcgtccgccagatgcacgtccaccggagagatcttcttgtagttcttcatgtactccttcgagtacgtcatgtgctgtgtcgcacccgagtcgaccagccacatgccgctcagcttggaggcacccgtgtcgccaccaaccgagaagaggaggtcgccagagtcatcttcgacctgcgcgacgttcgctcgttgcggcctctgccgctccccgttctcgcggatccgcaccggacacttggcgatccaatgtccgtgctcgccgcagtagtggcaggcgctcgtcctctgcgcttgcgcctgccgtcccttgcgcttcccgttgtcgcttgtcatgaacgcttgaccttgagcgtgcgcggttccgtcagcaccgccaccttgttccttgcgcttcatgtcctcgtgcaggagccgacacaaaaggtagagcacttgagcagtagttggcaaaatgcaaagtgattcgattcaggtccttagttcgcaaccgcgtgctacctctaagcctgctactggatacctcttactggatacaccctactggattctctactggatacacagttaccttatccaatcagagaacaccacgtcgatgcccatcttgtacccacaatcctgtacccacaatcatggcgtaatcaccgtgacgtaannnnnnnnnnnnnnnnnnnnnnnnnnnnnnnnnnnnnnnnnnnnnnnnnnnnnnnnnnnnnnnnnnnnnnnnnnnnnnnnnnnnnnnnnnnnnnnnnnnnnnnnnnnnnnnnnnnnnnnnnnnnnnnnnnnnnnnnnnnnnnnnnnnnnnnnnnnnnnnnnnnnnnnnnnnnnnnnnnnnnnnnnnnnnnnnnnnnnnnnnnnnnnnnnnnnnnnnnnnnnnnnnnnnnnnnnnnnnnnnnnnnnnnnnnnnnnnnnnnnnnnnnnnnnnnnnnnnnnnnnnnnnnnnnnnnnnnnnnnnnnnnnnnnnnnnnnnnnnnnnnnnnnnnnnnnnnnnnnnnnnnnnnnnnnnnnnnnnnnnnnnnnnnnnnnnnnnnnnnnnnnnnnnnnnnnnnnnnnnnnnnnnnnnnnnnnnnnnnnnnnnnnnnnnnnnnnnnnnnnnnnnnnnnnnnnnnnnnnnnnnnnnnnnnnnnnnnnnnnnnnnnnnnnnnnnnnnnnnnnnnnnnnnnnnnnnnnnnnnnnnnnnnnnnnnnnnnnnnnnnnnnnnnnnnnnnnnnnnnnnnnnnnnnnnnnnnnnnnnnnnnnnnnnnnnnnnnnnnnnnnnnnnnnnnnnnnnnnnnnnnnnnnnnnnnnnnnnnnnnnnnnnnnnnnnnnnnnnnnnnnnnnnnnnnnnnnnnnnnnnnnnnnnnnnnnnnnnnnnnnnnnnnnnnnnnnnnnnnnnnnnnnnnnnnnnnnnnnnnnnnnnnnnnnnnnnnnnnnnnnnnnnnnnnnnnnnnnnnnnnnnnnnnnnnnnnnnnnnnnnnnnnnnnnnnnnnnnnnnnnnnnnnnnnnnnnnnnnnnnnnnnnnnnnnnnnnnnnnnnnnnnnnnnnnnnnnnnnnnnnnnnnnnnnnnnnnnnnnnnnnnnnnnnnnnnnnnnnnnnnnnnnnnnnnnnnnnnnnnnnnnnnnnnnnnnnnnnnnnnnnnnnnnnnnnnnnnnnnnnnnnnnnnnnnnnnnnnnnnnnnnnnnnnnnnnnnnnnnnnnnnnnnnnnnnnnnnnnnnnnnnnnnnnnnnnnnnnnnnnnnnnnnnnnnnnnnnnnnnnnnnnnnnnnnnnnnnnnnnnnnnnnnnnnnnnnnnnnnnnnnnnnnnnnnnnnnnnnnnnnnnnnnnnnnnnnnnnnnnnnnnnnnnnnnnnnnnnnnnnnnnnnnnnnnnnnnnnnnnnnnnnnnnnnnnnnnnnnnnnnnnnnnnnnnnnnnnnnnnnnnnnnnnnnnnnnnnnnnnnnnnnnnnnnnnnnnnnnnnnnnnnnnnnnnnnnnnnnnnnnnnnnnnnnnnnnnnnnnnnnnnnnnnnnnnnnnnnnnnnnnnnnnnnnnnnnnnnnnnnnnnnnnnnnnnnnnnnnnnnnnnnnnnnnnnnnnnnnnnnnnnnnnnnnnnnnnnnnnnnnnnnnnnnnnnnnnnnnnnnnnnnnnnnnnnnnnnnnnnnnnnnnnnnnnnnnnnnnnnnnnnnnnnnnnnnnnnnnnnnnnnnnnnnnnnnnnnnnnnnnnnnnnnnnnnnnnnnnnnnnnnnnnnnnnnnnnnnnnnnnnnnnnnnnnnnnnnnnnnnnnnnnnnnnnnnnnnnnnnnnnnnnnnnnnnnnnnnnnnnnnnnnnnnnnnnnnnnnnnnnnnnnnnnnnnnnnnnnnnnnnnnnnnnnnnnnnnnnnnnnnnnnnnnnnnnnnnnnnnnnnnnnnnnnnnnnnnnnnnnnnnnnnnnnnnnnnnnnnnnnnnnnnnnnnnnnnnnnnnnnnnnnnnnnnnnnnnnnnnnnnnnnnnnnnnnnnnnnnnnnnnnnnnnnnnnnnnnnnnnnnnnnnnnnnnnnnnnnnnnnnnnnnnnnnnnnnnnnnnnnnnnnnnnnnnnnnnnnnnnnnnnnnnnnnnnnnnnnnnnnnnnnnnnnnnnnnnnnnnnnnnnnnnnnnnnnnnnnnnnnnnnnnnnnnnnnnnnnnnnnnnnnnnnnnnnnnnnnnnnnnnnnnnnnnnnnnnnnnnnnnnnnnnnnnnnnnnnnnnnnnnnnnnnnnnnnnnnnnnnnnnnnnnnnnnnnnnnnnnnnnnnnnnnnnnnnnnnnnnnnnnnnnnnnnnnnnnnnnnnnnnnnnnnnnnnnnnnnnnnnnnnnnnnnnnnnnnnnnnnnnnnnnnnnnnnnnnnnnnnnnnnnnnnnnnnnnnnnnnnnnnnnnnnnnnnnnnnnnnnnnnnnnnnnnnnnnnnnnnnnnnnnnnnnnnnnnnnnnnnnnnnnnnnnnnnnnnnnnnnnnnnnnnnnnnnnnnnnnnnnnnnnnnnnnnnnnnnnnnnnnnnnnnnnnnnnnnnnnnnnnnnnnnnnnnnnnnnnnnnnnnnnnnnnnnnnnnnnnnnnnnnnnnnnnnnnnnnnnnnnnnnnnnnnnnnnnnnnnnnnnnnnnnnnnnnnnnnnnnnnnnnnnnnnnnnnnnnnnnnnnnnnnnnnnnnnnnnnnnnnnnnnnnnnnnnnnnnnnnnnnnnnnnnnnnnnnnnnnnnnnnnnnnnnnnnnnnnnnnnnnnnnnnnnnnnnnnnnnnnnnnnnnnnnnnnnnnnnnnnnnnnnnnnnnnnnnnnnnnnnnnnnnnnnnnnnnnnnnnnnnnnnnnnnnnnnnnnnnnnnnnnnnnnnnnnnnnnnnnnnnnnnnnnnnnnnnnnnnnnnnnnnnnnnnnnnnnnnnnnnnnnnnnnnnnnnnnnnnnnnnnnnnnnnnnnnnnnnnnnnnnnnnnnnnnnnnnnnnnnnnnnnnnnnnnnnnnnnnnnnnnnnnnnnnnnnnnnnnnnnnnnnnnnnnnnnnnnnnnnnnnnnnnnnnnnnnnnnnnnnnnnnnnnnnnnnnnnnnnnnnnnnnnnnnnnnnnnnnnnnnnnnnnnnnnnnnnnnnnnnnnnnnnnnnnnnnnnnnnnnnnnnnnnnnnnnnnnnnnnnnnnnnnnnnnnnnnnnnnnnnnnnnnnnnnnnnnnnnnnnnnnnnnnnnnnnnnnnnnnnnnnnnnnnnnnnnnnnnnnnnnnnnnnnnnnnnnnnnnnnnnnnnnnnnnnnnnnnnnnnnnnnnnnnnnnnnnnnnnnnnnnnnnnnnnnnnnnnnnnnnnnnnnnnnnnnnnnnnnnnnnnnnnnnnnnnnnnnnnnnnnnnnnnnnnnnnnnnnnnnnnnnnnnnnnnnnnnnnnnnnnnnnnnnnnnnnnnnnnnnnnnnnnnnnnnnnnnnnnnnnnnnnnnnnnnnnnnnnnnnnnnnnnnnnnnnnnnnnnnnnnnnnnnnnnnnnnnnnnnnnnnnnnnnnnnnnnnnnnnnnnnnnnnnnnnnnnnnnnnnnnnnnnnnnnnnnnnnnnnnnnnnnnnnnnnnnnnnnnnnnnnnnnnnnnnnnnnnnnnnnnnnnnnnnnnnnnnnnnnnnnnnnnnnnnnnnnnnnnnnnnnnnnnnnnnnnnnnnnnnnnnnnnnnnnnnnnnnnnnnnnnnnnnnnnnnnnnnnnnnnnnnnnnnnnnnnnnnnnnnnnnnnnnnnnnnnnnnnnnnnnnnnnnnnnnnnnnnnnnnnnnnnnnnnnnnnnnnnnnnnnnnnnnnnnnnnnnnnnnnnnnnnnnnnnnnnnnnnnnnnnnnnnnnnnnnnnnnnnnnnnnnnnnnnnnnnnnnnnnnnnnnnnnnnnnnnnnnnnnnnnnnnnnnnnnnnnnnnnnnnnnnnnnnnnnnnnnnnnnnnnnnnnnnnnnnnnnnnnnnnnnnnnnnnnnnnnnnnnnnnnnnnnnnnnnnnnnnnnnnnnnnnnnnnnnnnnnnnnnnnnnnnnnnnnnnnnnnnnnnnnnnnnnnnnnnnnnnnnnnnnnnnnnnnnnnnnnnnnnnnnnnnnnnnnnnnnnnnnnnnnnnnnnnnnnnnnnnnnnnnnnnnnnnnnnnnnnnnnnnnnnnnnnnnnnnnnnnnnnnnnnnnnnnnnnnnnnnnnnnnnnnnnnnnnnnnnnnnnnnnnnnnnnnnnnnnnnnnnnnnnnnnnnnnnnnnnnnnnnnnnnnnnnnnnnnnnnnnnnnnnnnnnnnnnnnnnnnnnnnnnnnnnnnnnnnnnnnnnnnnnnnnnnnnnnnnnnnnnnnnnnnnnnnnnnnnnnnnnnnnnnnnnnnnnnnnnnnnnnnnnnnnnnnnnnnnnnnnnnnnnnnnnnnnnnnnnnnnnnnnnnnnnnnnnnnnnnnnnnnnnnnnnnnnnnnnnnnnnnnnnnnnnnnnnnnnnnnnnnnnnnnnnnnnnnnnnnnnnnnnnnnnnnnnnnnnnnnnnnnnnnnnnnnnnnnnnnnnnnnnnnnnnnnnnnnnnnnnnnnnnnnnnnnnnnnnnnnnnnnnnnnnnnnnnnnnnnnnnnnnnnnnnnnnnnnnnnnnnnnnnnnnnnnnnnnnnnnnnnnnnnnnnnnnnnnnnnnnnnnnnnnnnnnnnnnnnnnnnnnnnnnnnnnnnnnnnnnnnnnnnnnnnnnnnnnnnnnnnnnnnnnnnnnnnnnnnnnnnnnnnnnnnnnnnnnnnnnnnnnnnnnnnnnnnnnnnnnnnnnnnnnnnnnnnnnnnnnnnnnnnnnnnnnnnnnnnnnnnnnnnnnnnnnnnnnnnnnnnnnnnnnnnnnnnnnnnnnnnnnnnnnnnnnnnnnnnnnnnnnnnnnnnnnnnnnnnnnnnnnnnnnnnnnnnnnnnnnnnnnnnnnnnnnnnnnnnnnnnnnnnnnnnnnnnnnnnnnnnnnnnnnnnnnnnnnnnnnnnnnnnnnnnnnnnnnnnnnnnnnnnnnnnnnnnnnnnnnnnnnnnnnnnnnnnnnnnnnnnnnnnnnnnnnnnnnnnnnnnnnnnnnnnnnnnnnnnnnnnnnnnnnnnnnnnnnnnnnnnnnnnnnnnnnnnnnnnnnnnnnnnnnnnnnnnnnnnnnnnnnnnnnnnnnnnnnnnnnnnnnnnnnnnnnnnnnnnnnnnnnnnnnnnnnnnnnnnnnnnnnnnnnnnnnnnnnnnnnnnnnnnnnnnnnnnnnnnnnnnnnnnnnnnnnnnnnnnnnnnnnnnnnnnnnnnnnnnnnnnnnnnnnnnnnnnnnnnnnnnnnnnnnnnnnnnnnnnnnnnnnnnnnnnnnnnnnnnnnnnnnnnnnnnnnnnnnnnnnnnnnnnnnnnnnnnnnnnnnnnnnnnnnnnnnnnnnnnnnnnnnnnnnnnnnnnnnnnnnnnnnnnnnnnnnnnnnnnnnnnnnnnnnnnnnnnnnnnnnnnnnnnnnnnnnnnnnnnnnnnnnnnnnnnnnnnnnnnnnnnnnnnnnnnnnnnnnnnnnnnnnnnnnnnnnnnnnnnnnnnnnnnnnnnnnnnnnnnnnnnnnnnnnnnnnnnnnnnnnnnnnnnnnnnnnnnnnnnnnnnnnnnnnnnnnnnnnnnnnnnnnnnnnnnnnnnnnnnnnnnnnnnnnnnnnnnnnnnnnnnnnnnnnnnnnnnnnnnnnnnnnnnnnnnnnnnnnnnnnnnnnnnnnnnnnnnnnnnnnnnnnnnnnnnnnnnnnnnnnnnnnnnnnnnnnnnnnnnnnnnnnnnnnnnnnnnnnnnnnnnnnnnnnnnnnnnnnnnnnnnnnnnnnnnnnnnnnnnnnnnnnnnnnnnnnnnnnnnnnnnnnnnnnnnnnnnnnnnnnnnnnnnnnnnnnnnnnnnnnnnnnnnnnnnnnnnnnnnnnnnnnnnnnnnnnnnnnnnnnnnnnnnnnnnnnnnnnnnnnnnnnnnnnnnnnnnnnnnnnnnnnnnnnnnnnnnnnnnnnnnnnnnnnnnnnnnnnnnnnnnnnnnnnnnnnnnnnnnnnnnnnnnnnnnnnnnnnnnnnnnnnnnnnnnnnnnnnnnnnnnnnnnnnnnnnnnnnnnnnnnnnnnnnnnnnnnnnnnnnnnnnnnnnnnnnnnnnnnnnnnnnnnnnnnnnnnnnnnnnnnnnnnnnnnnnnnnnnnnnnnnnnnnnnnnnnnnnnnnnnnnnnnnnnnnnnnnnnnnnnnnnnnnnnnnnnnnnnnnnnnnnnnnnnnnnnnnnnnnnnnnnnnnnnnnnnnnnnnnnnnnnnnnnnnnnnnnnnnnnnnnnnnnnnnnnnnnnnnnnnnnnnnnnnnnnnnnnnnnnnnnnnnnnnnnnnnnnnnnnnnnnnnnnnnnnnnnnnnnnnnnnnnnnnnnnnnnnnnnnnnnnnnnnnnnnnnnnnnnnnnnnnnnnnnnnnnnnnnnnnnnnnnnnnnnnnnnnnnnnnnnnnnnnnnnnnnnnnnnnnnnnnnnnnnnnnnnnnnnnnnnnnnnnnnnnnnnnnnnnnnnnnnnnnnnnnnnnnnnnnnnnnnnnnnnnnnnnnnnnnnnnnnnnnnnnnnnnnnnnnnnnnnnnnnnnnnnnnnnnnnnnnnnnnnnnnnnnnnnnnnnnnnnnnnnnnnnnnnnnnnnnnnnnnnnnnnnnnnnnnnnnnnnnnnnnnnnnnnnnnnnnnnnnnnnnnnnnnnnnnnnnnnnnnnnnnnnnnnnnnnnnnnnnnnnnnnnnnnnnnnnnnnnnnnnnnnnnnnnnnnnnnnnnnnnnnnnnnnnnnnnnnnnnnnnnnnnnnnnnnnnnnnnnnnnnnnnnnnnnnnnnnnnnnnnnnnnnnnnnnnnnnnnnnnnnnnnnnnnnnnnnnnnnnnnnnnnnnnnnnnnnnnnnnnnnnnnnnnnnnnnnnnnnnnnnnnnnnnnnnnnnnnnnnnnnnnnnnnnnnnnnnnnnnnnnnnnnnnnnnnnnnnnnnnnnnnnnnnnnnnnnnnnnnnnnnnnnnnnnnnnnnnnnnnnnnnnnnnnnnnnnnnnnnnnnnnnnnnnnnnnnnnnnnnnnnnnnnnnnnnnnnnnnnnnnnnnnnnnnnnnnnnnnnnnnnnnnnnnnnnnnnnnnnnnnnnnnnnnnnnnnnnnnnnnnnnnnnnnnnnnnnnnnnnnnnnnnnnnnnnnnnnnnnnnnnnnnnnnnnnnnnnnnnnnnnnnnnnnnnnnnnnnnnnnnnnnnnnnnnnnnnnnnnnnnnnnnnnnnnnnnnnnnnnnnnnnnnnnnnnnnnnnnnnnnnnnnnnnnnnnnnnnnnnnnnnnnnnnnnnnnnnnnnnnnnnnnnnnnnnnnnnnnnnnnnnnnnnnnnnnnnnnnnnnnnnnnnnnnnnnnnnnnnnnnnnnnnnnnnnnnnnnnnnnnnnnnnnnnnnnnnnnnnnnnnnnnnnnnnnnnnnnnnnnnnnnnnnnnnnnnnnnnnnnnnnnnnnnnnnnnnnnnnnnnnnnnnnnnnnnnnnnnnnnnnnnnnnnnnnnnnnnnnnnnnnnnnnnnnnnnnnnnnnnnnnnnnnnnnnnnnnnnnnnnnnnnnnnnnnnnnnnnnnnnnnnnnnnnnnnnnnnnnnnnnnnnnnnnnnnnnnnnnnnnnnnnnnnnnnnnnnnnnnnnnnnnnnnnnnnnnnnnnnnnnnnnnnnnnnnnnnnnnnnnnnnnnnnnnnnnnnnnnnnnnnnnnnnnnnnnnnnnnnnnnnnnnnnnnnnnnnnnnnnnnnnnnnnnnnnnnnnnnnnnnnnnnnnnnnnnnnnnnnnnnnnnnnnnnnnnnnnnnnnnnnnnnnnnnnnnnnnnnnnnnnnnnnnnnnnnnnnnnnnnnnnnnnnnnnnnnnnnnnnnnnnnnnnnnnnnnnnnnnnnnnnnnnnnnnnnnnnnnnnnnnnnnnnnnnnnnnnnnnnnnnnnnnnnnnnnnnnnnnnnnnnnnnnnnnnnnnnnnnnnnnnnnnnnnnnnnnnnnnnnnnnnnnnnnnnnnnnnnnnnnnnnnnnnnnnnnnnnnnnnnnnnnnnnnnnnnnnnnnnnnnnnnnnnnnnnnnnnnnnnnnnnnnnnnnnnnnnnnnnnnnnnnnnnnnnnnnnnnnnnnnnnnnnnnnnnnnnnnnnnnnnnnnnnnnnnnnnnnnnnnnnnnnnnnnnnnnnnnnnnnnnnnnnnnnnnnnnnnnnnnnnnnnnnnnnnnnnnnnnnnnnnnnnnnnnnnnnnnnnnnnnnnnnnnnnnnnnnnnnnnnnnnnnnnnnnnnnnnnnnnnnnnnnnnnnnnnnnnnnnnnnnnnnnnnnnnnnnnnnnnnnnnnnnnnnnnnnnnnnnnnnnnnnnnnnnnnnnnnnnnnnnnnnnnnnnnnnnnnnnnnnnnnnnnnnnnnnnnnnnnnnnnnnnnnnnnnnnnnnnnnnnnnnnnnnnnnnnnnnnnnnnnnnnnnnnnnnnnnnnnnnnnnnnnnnnnnnnnnnnnnnnnnnnnnnnnnnnnnnnnnnnnnnnnnnnnnnnnnnnnnnnnnnnnnnnnnnnnnnnnnnnnnnnnnnnnnnnnnnnnnnnnnnnnnnnnnnnnnnnnnnnnnnnnnnnnnnnnnnnnnnnnnnnnnnnnnnnnnnnnnnnnnnnnnnnnnnnnnnnnnnnnnnnnnnnnnnnnnnnnnnnnnnnnnnnnnnnnnnnnnnnnnnnnnnnnnnnnnnnnnnnnnnnnnnnnnnnnnnnnnnnnnnnnnnnnnnnnnnnnnnnnnnnnnnnnnnnnnnnnnnnnnnnnnnnnnnnnnnnnnnnnnnnnnnnnnnnnnnnnnnnnnnnnnnnnnnnnnnnnnnnnnnnnnnnnnnnnnnnnnnnnnnnnnnnnnnnnnnnnnnnnnnnnnnnnnnnnnnnnnnnnnnnnnnnnnnnnnnnnnnnnnnnnnnnnnnnnnnnnnnnnnnnnnnnnnnnnnnnnnnnnnnnnnnnnnnnnnnnnnnnnnnnnnnnnnnnnnnnnnnnnnnnnnnnnnnnnnnnnnnnnnnnnnnnnnnnnnnnnnnnnnnnnnnnnnnnnnnnnnnnnnnnnnnnnnnnnnnnnnnnnnnnnnnnnnnnnnnnnnnnnnnnnnnnnnnnnnnnnnnnnnnnnnnnnnnnnnnnnnnnnnnnnnnnnnnnnnnnnnnnnnnnnnnnnnnnnnnnnnnnnnnnnnnnnnnnnnnnnnnnnnnnnnnnnnnnnnnnnnnnnnnnnnnnnnnnnnnnnnnnnnnnnnnnnnnnnnnnnnnnnnnnnnnnnnnnnnnnnnnnnnnnnnnnnnnnnnnnnnnnnnnnnnnnnnnnnnnnnnnnnnnnnnnnnnnnnnnnnnnnnnnnnnnnnnnnnnnnnnnnnnnnnnnnnnnnnnnnnnnnnnnnnnnnnnnnnnnnnnnnnnnnnnnnnnnnnnnnnnnnnnnnnnnnnnnnnnnnnnnnnnnnnnnnnnnnnnnnnnnnnnnnnnnnnnnnnnnnnnnnnnnnnnnnnnnnnnnnnnnnnnnnnnnnnnnnnnnnnnnnnnnnnnnnnnnnnnnnnnnnnnnnnnnnnnnnnnnnnnnnnnnnnnnnnnnnnnnnnnnnnnnnnnnnnnnnnnnnnnnnnnnnnnnnnnnnnnnnnnnnnnnnnnnnnnnnnnnnnnnnnnnnnnnnnnnnnnnnnnnnnnnnnnnnnnnnnnnnnnnnnnnnnnnnnnnnnnnnnnnnnnnnnnnnnnnnnnnnnnnnnnnnnnnnnnnnnnnnnnnnnnnnnnnnnnnnnnnnnnnnnnnnnnnnnnnnnnnnnnnnnnnnnnnnnnnnnnnnnnnnnnnnnnnnnnnnnnnnnnnnnnnnnnnnnnnnnnnnnnnnnnnnnnnnnnnnnnnnnnnnnnnnnnnnnnnnnnnnnnnnnnnnnnnnnnnnnnnnnnnnnnnnnnnnnnnnnnnnnnnnnnnnnnnnnnnnnnnnnnnnnnnnnnnnnnnnnnnnnnnnnnnnnnnnnnnnnnnnnnnnnnnnnnnnnnnnnnnnnnnnnnnnnnnnnnnnnnnnnnnnnnnnnnnnnnnnnnnnnnnnnnnnnnnnnnnnnnnnnnnnnnnnnnnnnnnnnnnnnnnnnnnnnnnnnnnnnnnnnnnnnnnnnnnnnnnnnnnnnnnnnnnnnnnnnnnnnnnnnnnnnnnnnnnnnnnnnnnnnnnnnnnnnnnnnnnnnnnnnnnnnnnnnnnnnnnnnnnnnnnnnnnnnnnnnnnnnnnnnnnnnnnnnnnnnnnnnnnnnnnnnnnnnnnnnnnnnnnnnnnnnnnnnnnnnnnnnnnnnnnnnnnnnnnnnnnnnnnnnnnnnnnnnnnnnnnnnnnnnnnnnnnnnnnnnnnnnnnnnnnnnnnnnnnnnnnnnnnnnnnnnnnnnnnnnnnnnnnnnnnnnnnnnnnnnnnnnnnnnnnnnnnnnnnnnnnnnnnnnnnnnnnnnnnnnnnnnnnnnnnnnnnnnnnnnnnnnnnnnnnnnnnnnnnnnnnnnnnnnnnnnnnnnnnnnnnnnnnnnnnnnnnnnnnnnnnnnnnnnnnnnnnnnnnnnnnnnnnnnnnnnnnnnnnnnnnnnnnnnnnnnnnnnnnnnnnnnnnnnnnnnnnnnnnnnnnnnnnnnnnnnnnnnnnnnnnnnnnnnnnnnnnnnnnnnnnnnnnnnnnnnnnnnnnnnnnnnnnnnnnnnnnnnnnnnnnnnnnnnnnnnnnnnnnnnnnnnnnnnnnnnnnnnnnnnnnnnnnnnnnnnnnnnnnnnnnnnnnnnnnnnnnnnnnnnnnnnnnnnnnnnnnnnnnnnnnnnnnnnnnnnnnnnnnnnnnnnnnnnnnnnnnnnnnnnnnnnnnnnnnnnnnnnnnnnnnnnnnnnnnnnnnnnnnnnnnnnnnnnnnnnnnnnnnnnnnnnnnnnnnnnnnnnnnnnnnnnnnnnnnnnnnnnnnnnnnnnnnnnnnnnnnnnnnnnnnnnnnnnnnnnnnnnnnnnnnnnnnnnnnnnnnnnnnnnnnnnnnnnnnnnnnnnnnnnnnnnnnnnnnnnnnnnnnnnnnnnnnnnnnnnnnnnnnnnnnnnnnnnnnnnnnnnnnnnnnnnnnnnnnnnnnnnnnnnnnnnnnnnnnnnnnnnnnnnnnnnnnnnnnnnnnnnnnnnnnnnnnnnnnnnnnnngttcagaagtgcgagtccgaccactgcatctacttgaagcgggacaatcacgacatgatgtttgtggcactgtacgtggacgatctggtcctcgccagcagcagcgacaggatgctgaaggacacgaagcaggcgctgagtgaccggttcgagatgaccgacatgggccagctcaagtactttctcggtatggagatcgagcaagatgtggcgactgggaaggtgtcggtgcggcagaccaagttcgcgaaggacattctcgagaagttcaagatggatgagagcaaccctgtgaagacaccgcaggatccgggtctgaagctgaccaaggccatgtgcgagggaggctgcaagcacgacgagaccatggcgaatgttccgtaccggaacgccgtgggctgcctcatgtatctcatggtggggactcgtccggacctcgcagcggcagtgggagtgctgagccagttcgcagcggacccatgtccgacacactggcaggcgctcaagagggtcttccgctacatccgaggcacgaagacgcacggcctcgtgtttcaagcgagcagcgaggacggactgcaaggctactcggacgcggactgggccggcgacatcgagtctcgacggagtacgagcggctacgcgttcatgatgaacggcggatgcatcagctggcgaagcaagaagcagcgcacggtggcgctctcgtcgacggaagccgagtacatggcgctgtcggaggccacgcaggaggcggtgtggctcaaggtgtttctgtgcgagctgggcgagatggcgagcgatgaaggggtgaagatctacgaggacaaccaaggctccatcgcgttggccaagaacccggagttccacaagcgcaccaagcacatcgacattcgctaccacttcgtgcgcgagaaggtggaagacggtcaagtggtgttgcagtatgtttcgacactcgacatgctggcgaacatcatgacgaagccgatcgcggcgccgcagttcgacgcgctcaggacgaagctgggcatcgtggtcactgacgagtcgagtgggagtgttgtcaagactgatgtgacgacgcctcgccaagcgaccgtgtgacgcgaacgcgtcatcagtgaggtcggcgtgaccttcactgtgttgtaccgcaatcattcaggtgattacgggacgatgattacgtcacggtgattacgccaagattgtgggtacaagatgggcatcgacgtggcgttctctgattggataaggtaactgtgtatccagtagagaatccagtagggtgtacccagtaagaggtatccagtagcaggcttagaggtagcacgcggttgcgaactaaggacctgaatcgaatcactttgcattttgccaactactgctcaagtgttcttccttttggttatgagcccaagccccgtcttccctgaccaagaccccgactacgccttcgccatggacgccgccccgaccgcgaccgcccgcatcaacaagttcgacggaaccaacttccacacatggaagttcaagatgcagatggtgctggaggnnnnnnnnnnnnnnnnnnnnnnnnnnnnnnnnnnnnnnnnnnnnnnnnnnnnnnnnnnnnnnnnnnnnnnnnnnnnnnnnnnnnnnnnnnnnnnnnnnnnnnnnnnnnnnnnnnnnnnnnnnnnnnnnnnnnnnnnnnnnnnnnnnnnnnnnnnnnnnnnnnnnnnnnnnnnnnnnnnnnnnnnnnnnnnnnnnnnnnnnnnnnnnnnnnnnnnnnnnnnnnnnnnnnnnnnnnnnnnnnnnnnnnnnnnnnnnnnnnnnnnnggatatgtgtcgatcggatctcgtcgatacatggaatggcagaatctagcctttcaagccacgacagatgaccggccgacgagccaggaggcaccaacgggacctccagtatctgccgtcgagcgaccgatttatcctacgccccgagccattctattgagggttgctggtcttgggtactgtgtaccagttgtacctattaaccggttaacccgaaccggtccaatccgaacccacgttgattatggtgatattgagggttgctggtcttgggtactgtgtatcagttgtacccattaaccggttaacccgaaccggtccaatccgaacccacgttgattatggtgattacggtaagttgtttacgccaccgatgattagacgagtaggatgattggatgaacaccggtgagtgatggttgattagatgcactaggtgataggacgcagggtcgcgtgtttataacagtagggtgtaagctccaacaattcaatcactttcgaatcttcattctacccctcaagtgccttcgctccggtcccgccgtctgcgacgtccctccctccgcttcgtccgagcttcgtgtccaagatccataccttccatcaggttatgagcccaagcaccatgtcctctgcccaagacgcctcgaccaaggtctccattgacaagttcaacggggacaactacgcgacgtggaaccgctacatgcgtggcgtgttcctgaccaagtcgacgtggcatgtcgtgaaccgcgagacggcgccgagcttcacggactcgcgggccaaggacgactacgtcaagtcgagcaacatcgcgttcggactgatgttgctccacatggacgcggactaccaccatgtggtcgacgactgcgaggaagcgtgggttgcgtggacgcgcctgaagacgctgtacggtggttggcagaaggctggacgcatctacctgaagcgccaactcttcagcatggagatgtcggaaggcggcaacgtcttgcatcattgcaacgaggtcctcaacatcagcgccaagctcagcagcatcggcgccaagatggaggatgaggacgtggcgatctgcctgttgcgcagcctccccaagagctacgagaacgtcgtgctgaacttggagatgagcagcgctgaactacgatcgcaagacgtcgtgaaggtgctgacgaatgagcacatcaagagacaaggcgagaagacggcgacggtgaagacggagaatgcggccaaggcgttcaacaccgaccgagagtctcgccagtgtacgtactgcgggaaattggggcacacgattgacaagtgctggaccaagcagaaggacgagaatcggggcccaagacgcggcggcaatggcaatggccgtggacgcggggccaacaatgcccagtggaggaacgacgacgccagctacaactacgactacggctatgatcgagtggcgttcgcggtctcactggagtgtggcatttcgacgggcaagaatgtgtccgggttgtgggcggtcgacagcggcgcaacgcaccacatctgcaacgacaaggccaagttcgctcatttgattgagcggaatgaaggcgaactttcggtggccgacggcaacaaggcggccatcatgggtgtggggaccatcgtggaacgagtggttctgcccaacggcgacgagcgcgacatcgagatcaagaacgcgctgtacgtcccaagcatgagcaagaatctgctttcggtgccacagatcaacaagagtggtctgttccaagtcgtgttcgacagcaccaagatgcagattgcgcacaagggcgccaagcaagtggtggcgacggcaaacctcgtggatggtctctactggctccagacgcctcagcgatcggcgaatgcggcgaccagtgggaagacggtcgacttacacgcgcgtatgggtcacgctccggtggaggtgcttcgcaagatggtcgacaacaacatgatcaaggacgcgaaggcaccttccaagtcgagtggaccaagcgtgtgtcgcggctgccagcaagggaaaatggtccagaagccgttcccaagcaaccgtgacaagcgtcactacgacacgttcgagctgctccacttcgacgtgtgcggccccatggaagaagagtcactgggtggcagcaagtatctgctgctgatcgtggacgaagccagcggatgcatgaaggggttctgcctgcgtgccaagtcggagagcgaggactgcatcaagatgtacgtcacgaaggtgcagacgcagtgcggcaagaaggtcaagtttgtgcggcacgacggagcccgtgagttcgcgaccaactcgctcaaggccttctacgaagtcgaaggcatcgagcagcaaaccacggttccgtacgcgcaccagaccaacggcacggcagaacgcgccatccggaccatcgtcacgattggccgcagcatgctgcatcacgccaagctggacaagagcttctgggctgaggcggccatgacagccatctacgtgaagaatcgtctgccatcacccaagatcgaacacaagactccgttcgagatcgtttacaagtccaagccgagtgtgaagcacatgcgtgtgttcggatgccagacgtacatcctgacgccgaaggaaagacggcgcaagtgggaccccaaggctcgcgccgggctgttcctcggctacgaagaagtgtccaaggcgtatcgagtttatgacatcgaggcggggcaggtggttatcagtcgcgatgtcaacttcgatgagtcgacctttggactttcgacgcatacttcggatgaagacgtcgatgatgctgtgctagacttggacgcgctggacctggacgacaacgatggaccgcgccaaacgagcttcaagcaggcggggaagcgcaagtaccgaccgagtggcgacgacaacactgccagaagatcgcgccccgttcgccaccgagctggcttagaagcaagtgcgccggacgtatcctcctcgcgccgagccgaccccgacgaagaagaaaagtctggggaccaagatgaagacgacgactcgacgcctccagtgttttggcgtgccagtgccaacgctgtggaagcagcagccgatctatcggagccgacgacgttccaagaggctgtgaacggtcctgatcaagtgcactggcgcaaagcgatccgcgcggagctcaagtcgatgcgactgcgtggtgtgtttcgagctgccaagttgcctaacggataacgcgccatcgataccaagtgggtgttcaagatcaagcgcaaagcggacggctcgatcgagaagtacaaggcgcgcctcgtggccaagggcttcaagcagaagtacggcattgactacaccgagacgttctcgcccgtggtcaagtatgtgacgctgcgcatggtgatcgcgattgctaagtattttggctggcccctcgaccaactcgacgtggtgacagcattcctgtacgggataatgaaggaggtggtcttctgcgtggttccggaaggcgtcgaactggatggtgacttcgactgcctggaactggtgaaggccatctacggtctcaagcaagcttcgcgagtgtggaacgagaccttcgacgagttcgtgtgctccatcggcttccaagtgtcggccttcgatccgtgcctctacatcaaggtggtggacggtcactgcgggggatcnnnnnnnnnnnnnnnnnnnnnnnnnnnnnnnnnnnnnnnnnnnnnnnnnnnnnnnnnnnnnnnnnnnnnnnnnnnnnnnnnnnnnnnnnnnnnnnnnnnnnnnnnnnnnnnnnnnnnnnnnnnnnnnnnnnnnnnnnnnnnnnnnnnnnnnnnnnnnnnnnnnnnnnnnnnnnnnnnnnnnnnnnnnnnnnnnnnnnnnnnnnnnnnnnnnnnnnnnnnnnnnnnnnnnnnnnnnnnnnnnnnnnnnnnnnnnnnnnnnnnnnnnnnnnnnnnnnnnnnnnnnnnnnnnnnnnnnnnnnnnnnnnnnnnnnnnnnnnnnnnnnnnnnnnnnnnnnnnnnnnnnnnnnnnnnnnnnnnnnnnnnnnnnnnnnnnnnnnnnnnnnnnnnnnnnnnnnnnnnnnnnnnnnnnnnnnnnnnnnnnnnnnnnnnnnnnnnnnnnnnnnnnnnnnnnnnnnnnnnnnnnnnnnnnnnnnnnnnnnnnnnnnnnnnnnnnnnnnnnnnnnnnnnnnnnnnnnnnnnnnnnnnnnnnnnnnnnnnnnnnnnnnnnnnnnnnnnnnnnnnnnnnnnnnnnnnnnnnnnnnnnnnnnnnnnnnnnnnnnnnnnnnnnnnnnnnnnnnnnnnnnnnnnnnnnnnnnnnnnnnnnnnnnnnnnnnnnnnnnnnnnnnnnnnnnnnnnnnnnnnnnnnnnnnnnnnnnnnnnnnnnnnnnnnnnnnnnnnnnnnnnnnnnnnnnnnnnnnnnnnnnnnnnnnnnnnnnnnnnnnnnnnnnnnnnnnnnnnnnnnnnnnnnnnnnnnnnnnnnnnnnnnnnnnnnnnnnnnnnnnnnnnnnnnnnnnnnnnnnnnnnnnnnnnnnnnnnnnnnnnnnnnnnnnnnnnnnnnnnnnnnnnnnnnnnnnnnnnnnnnnnnnnnnnnnnnnnnnnnnnnnnnnnnnnnnnnnnnnnnnnnnnnnnnnnnnnnnnnnnnnnnnnnnnnnnnnnnnnnnnnnnnnnnnnnnnnnnnnnnnnnnnnnnnnnnnnnnnnnnnnnnnnnnnnnnnnnnnnnnnnnnnnnnnnnnnnnnnnnnnnnnnnnnnnnnnnnnnnnnnnnnnnnnnnnnnnnnnnnnnnnnnnnnnnnnnnnnnnnnnnnnnnnnnnnnnnnnnnnnnnnnnnnnnnnnnnnnnnnnnnnnnnnnnnnnnnnnnnnnnnnnnnnnnnnnnnnnnnnnnnnnnnnnnnnnnnnnnnnnnnnnnnnnnnnnnnnnnnnnnnnnnnnnnnnnnnnnnnnnnnnnnnnnnnnnnnnnnnnnnnnnnnnnnnnnnnnnnnnnnnnnnnnnnnnnnnnnnnnnnnnnnnnnnnnnnnnnnnnnnnnnnnnnnnnnnnnnnnnnnnnnnnnnnnnnnnnnnnnnnnnnnnnnnnnnnnnnnnnnnnnnnnnnnnnnnnnnnnnnnnnnnnnnnnnnnnnnnnnnnnnnnnnnnnnnnnnnnnnnnnnnnnnnnnnnnnnnnnnnnnnnnnnnnnnnnnnnnnnnnnnnnnnnnnnnnnnnnnnnnnnnnnnnnnnnnnnnnnnnnnnnnnnnnnnnnnnnnnnnnnnnnnnnnnnnnnnnnnnnnnnnnnnnnnnnnnnnnnnnnnnnnnnnnnnnnnnnnnnnnnnnnnnnnnnnnnnnnnnnnnnnnnnnnnnnnnnnnnnnnnnnnnnnnnnnnnnnnnnnnnnnnnnnnnnnnnnnnnnnnnnnnnnnnnnnnnnnnnnnnnnnnnnnnnnnnnnnnnnnnnnnnnnnnnnnnnnnnnnnnnnnnnnnnnnnnnnnnnnnnnnnnnnnnnnnnnnnnnnnnnnnnnnnnnnnnnnnnnnnnnnnnnnnnnnnnnnnnnnnnnnnnnnnnnnnnnnnnnnnnnnnnnnnnnnnnnnnnnnnnnnnnnnnnnnnnnnnnnnnnnnnnnnnnnnnnnnnnnnnnnnnnnnnnnnnnnnnnnnnnnnnnnnnnnnnnnnnnnnnnnnnnnnnnnnnnnnnnnnnnnnnnnnnnnnnnnnnnnnnnnnnnnnnnnnnnnnnnnnnnnnnnnnnnnnnnnnnnnnnnnnnnnnnnnnnnnnnnnnnnnnnnnnnnnnnnnnnnnnnnnnnnnnnnnnnnnnnnnnnnnnnnnnnnnnnnnnnnnnnnnnnnnnnnnnnnnnnnnnnnnnnnnnnnnnnnnnnnnnnnnnnnnnnnnnnnnnnnnnnnnnnnnnnnnnnnnnnnnnnnnnnnnnnnnnnnnnnnnnnnnnnnnnnnnnnnnnnnnnnnnnnnnnnnnnnnnnnnnnnnnnnnnnnnnnnnnnnnnnnnnnnnnnnnnnnnnnnnnnnnnnnnnnnnnnnnnnnnnnnnnnnnnnnnnnnnnnnnnnnnnnnnnnnnnnnnnnnnnnnnnnnnnnnnnnnnnnnnnnnnnnnnnnnnnnnnnnnnnnnnnnnnnnnnnnnnnnnnnnnnnnnnnnnnnnnnnnnnnnnnnnnnnnnnnnnnnnnnnnnnnnnnnnnnnnnnnnnnnnnnnnnnnnnnnnnnnnnnnnnnnnnnnnnnnnnnnnnnnnnnnnnnnnnnnnnnnnnnnnnnnnnnnnnnnnnnnnnnnnnnnnnnnnnnnnnnnnnnnnnnnnnnnnnnnnnnnnnnnnnnnnnnnnnnnnnnnnnnnnnnnnnnnnnnnnnnnnnnnnnnnnnnnnnnnnnnnnnnnnnnnnnnnnnnnnnnnnnnnnnnnnnnnnnnnnnnnnnnnnnnnnnnnnnnnnnnnnnnnnnnnnnnnnnnnnnnnnnnnnnnnnnnnnnnnnnnnnnnnnnnnnnnnnnnnnnnnnnnnnnnnnnnnnnnnnnnnnnnnnnnnnnnnnnnnnnnnnnnnnnnnnnnnnnnnnnnnnnnnnnnnnnnnnnnnnnnnnnnnnnnnnnnnnnnnnnnnnnnnnnnnnnnnnnnnnnnnnnnnnnnnnnnnnnnnnnnnnnnnnnnnnnnnnnnnnnnnnnnnnnnnnnnnnnnnnnnnnnnnnnnnnnnnnnnnnnnnnnnnnnnnnnnnnnnnnnnnnnnnnnnnnnnnnnnnnnnnnnnnnnnnnnnnnnnnnnnnnnnnnnnnnnnnnnnnnnnnnnnnnnnnnnnnnnnnnnnnnnnnnnnnnnnnnnnnnnnnggtggaggtgcttcgcaagatggtcgacaacaacatgatcaaggacgcgaaggcaccttccaagtcgagtggaccaagcgtgtgtcgcggctgccagcaaggggaaaatggtccaggagccgttcccaagcaaccgtgacaagcgtcactacgacacgttcgagctgctccacttcgacgtgtgcgtccccatggaagaagagtcactgggtggcagcaagtatctgctgctgatcgtggacgaagccagcggatgcatgaaggggttctgcgtgccaagtcggagagcgaggactgcatcaagatgtacgtcacgaaggtgcagacgcagttcggcaagaaggtcaagtttgtgcggcacgacggagcccgtgagttcgcgaccaactcgctcaaggccttctacgaagtcgaaggcatcgagcagcaaaccacggttccgtacgcgcaccagaccaacggcacggcagaacgcgccatccggaccatcgtcacgattggccgcagcatgctgcatcacgccaagctggacaagagcttctgggctgaggcggccatgacagccatctacgtgaagaatcgtctgccatcacccaagatcgaacacaagactccgttcgagatcgtttacaagtccaagccgagtgtgaagcacatgcgtgtgttcggatgccagacgtacatcctgacgccgaaggaaagacggcgcaagtgggaccccaaggctcgcgccgggctgttcctcggctacgaagaagtgtccaaggcgtatcgagtttatgacatcgaggcggggcaggtggttatcagtcgcgatgtcaacttcgatgagtcgacctttggactttcgacgcatacttcggatgaagacgtcgatgatgctgtgctggacttggacgcgctggacctggacgacaacgatggaccgcgccaaacgagcttcaagcaggcggggaagcgcaagtaccgaccgagtggcgacgacaacactgccagaagatcgcgccccgttcgccaccgagctggctttgaagaagcaagtgcgccggacgtatcctcctcgcgccgagccgaccccgacgaagaagaaaaagtctggggaccaagatgaagacgacgactcgacgcctccagtgttttggcgtgccagtgccaacgctgtggaagcagcagccgatctatcggagccgacgacgttccaagaggctgtgaacggtcctgatcaagtgcactggcgcaaagcgatccgcgcggagctctagtcgatgcgactgcgtggtgtttttcgagctgccaagttgcctaacggacaacgcgccatcgataccaagtgggtgttcaagatcaagcgcaaagcggacggctcgatcgagaagtgcaaggcgcgcctcgtggccaagggcttcaagcagaagtacggcattgactacaccgagacgttctcgcccgtggtcaagtatgtgacgctgcgcatggtgatcgcgattgctaagtattttggctggcccctcgaccaactcgacgtggtgacagcattcctgtacgggataatgaaggaggtggtcttctgcgtggttccggaaggcgtcgaactggatggtgacttcgactgcctggaactggtgaaggccatctacggtctcaagcaagcttcgcgagtgtggaacgagaccttcgacgagttcgtgtgctccatcggcttccaagtgtcggccttcgatccgtgcctctacatcaaggtggtggacggtcactgcgtgcttgtactggtgtacgtggatgacgtactgattaccgggagttcgcccgagctgatcgcacgcacgaagaccgacctgaagacgcgcttcgagatgaccgacagcggcaagtgcgcgtttgttcttgggatcgagttggtggacggcccggacggcagcgtgaccatgtgccagcggcgatacgtggacgacatcctgaagcgcttcgccatggacgagtgcaaggccgtggtgagtccggtggacatgagcactcgactggttccaagcgacgcggcgaccaaggtgaacgctccgtttcgcgaagctgttggtgctctgatgcacctaatgaccgccacgcgcccagacatcgcgtacgccgttggctatgtatcgcgcttcatggagaacccccaagaggaacactgggttgcggtcaagcgtatctttcgctacctgcaaggcaccaagacgcatgggatctgcttcaagccgggcgacaagatcgactttcgtggctactcggacgcggactgggccggcgacctcgccgaccgcaagtccacttcaggctacacgttcatgctcatgagtgcgcctgtgagctggggaagcaagaagcaatgaagcggagtacatcgcgctcagtctggctatccaagaaggcaagtggattcatcgcctgctatgcgagattctggcggccgctaatgagactggacccgaactcatgatccgcgaagacaacccgtcgtgcatcaagatgacgaagaacccagtgaaccacggtcgcgccaagcacatcgacatcaagtaccaccacatccgcgatgaagtcaagcgcggtgaagtcaagctccagtactgcgagacttctgtgatgctagcggacatcatgacgaaggcgcttacgggaccacgccacacggatctgacggtggctctcggcattcgtgggacttcgcattgagggggcgtattgagggttgctggtcttgggtactgtgtaccagttgtacccattaaccggttaacccgaaccggtccaatctgaacccacgttgattatggtgattacggtaagttgtttacgccaccgatgattagacgagtaggatgattggatgaacaccggtgagtgatggttgattagatgcactaggtgataggacgcagggtcgcgtgtctataacagtagggtgtaagctccaacaattcaatcactttcgaatcttcattctacccctcaagtgccttcgctccggtcccgccgtctgcgacgtccctccctccgcttcgtccgagcttcgtgtccaagatccataccttccatcagtccctatacaaatatctagtgtgaacgaccgcaatgaggcgatcccggacacatcaaatgacgaccgcggctannnnnnnnnnnnnnnnnnnnnnnnnnnnnnnnnnnnnnnnnnnnnnnnnnnnnnnnnnnnnnnnnnnnnnnnnnnnnnnnnnnnnnnnnnnnnnnnnnnnnnnnnnnnnnnnnnnnnnnnnnnnnnnnnnnnnnnnnnnnnnnnnnnnnnnnnnnnnnnnnnnnnnnnnnnnnnnnnnnnnnnnnnnnnnnnnnnnnnnnnnnnnnnnnnnnnnnnnnnnnnnnnnnnnnnnnnnnnnnnnnnnnnnnnnnnnnnnnnnnnnnnnnnnnnnnnnnnnnnnnnnnnnnnnnnnnnnnnnnnnnnnnnnnnnnnnnnnnnnnnnnnnnnnnnnnnnnnnnnnnnnnnnnnnnnnnnnnnnnnnnnnnnnnnnnnnnnnnnnnnnnnnnnnnnnnnnnnnnnnnnnnnnnnnnnnnnnnnnnnnnnnnnnnnnnnnnnnnnnnnnnnnnnnnnnnnnnnnnnnnnnnnnnnnnnnnnnnnnnnnnnnnnnnnnnnnnnnnnnnnnnnnnnnnnnnnnnnnnnnnnnnnnnnnnnnnnnnnnnnnnnnnnnnnnnnnnnnnnnnnnnnnnnnnnnnnnnnnnnnnnnnnnnnnnnnnnnnnnnnnnnnnnnnnnnnnnnnnnnnnnnnnnnnnnnnnnnnnnnnnnnnnnnnnnnnnnnnnnnnnnnnnnnnnnnnnnnnnnnnnnnnnnnnnnnnnnnnnnnnnnnnnnnnnnnnnnnnnnnnnnnnnnnnnnnnnnnnnnnnnnnnnnnnnnnnnnnnnnnnnnnnnnnnnnnnnnnnnnnnnnnnnnnnnnnnnnnnnnnnnnnnnnnnnnnnnnnnnnnnnnnnnnnnnnnnnnnnnnnnnnnnnnnnnnnnnnnnnnnnnnnnnnnnnnnnnnnnnnnnnnnnnnnnnnnnnnnnnnnnnnnnnnnnnnnnnnnnnnnnnnnnnnnnnnnnnnnnnnnnnnnnnnnnnnnnnnnnnnnnnnnnnnnnnnnnnnnnnnnnnnnnnnnnnnnnnnnnnnnnnnnnnnnnnnnnnnnnnnnnnnnnnnnnnnnnnnnnnnnnnnnnnnnnnnnnnnnnnnnnnnnnnnnnnnnnnnnnnnnnnnnnnnnnnnnnnnnnnnnnnnnnnnnnnnnnnnnnnnnnnnnnnnnnnnnnnnnnnnnnnnnnnnnnnnnnnnnnnnnnnnnnnnnnnnnnnnnnnnnnnnnnnnnnnnnnnnnnnnnnnnnnnnnnnnnnnnnnnnnnnnnnnnnnnnnnnnnnnnnnnnnnnnnnnnnnnnnnnnnnnnnnnnnnnnnnnnnnnnnnnnnnnnnnnnnnnnnnnnnnnnnnnnnnnnnnnnnnnnnnnnnnnnnnnnnnnnnnnnnnnnnnnnnnnnnnnnnnnnnnnnnnnnnnnnnnnnnnnnnnnnnnnnnnnnnnnnnnnnnnnnnnnnnnnnnnnnnnnnnnnnnnnnnnnnnnnnnnnnnnnnnnnnnnnnnnnnnnnnnnnnnnnnnnnnnnnnnnnnnnnnnnnnnnnnnnnnnnnnnnnnnnnnnnnnnnnnnnnnnnnnnnnnnnnnnnnnnnnnnnnnnnnnnnnnnnnnnnnnnnnnnnnnnnnnnnnnnnnnnnnnnnnnnnnnnnnnnnnnnnnnnnnnnnnnnnnnnnnnnnnnnnnnnnnnnnnnnnnnnnnnnnnnnnnnnnnnnnnnnnnnnnnnnnnnnnnnnnnnnnnnnnnnnnnnnnnnnnnnnnnnnnnnnnnnnnnnnnnnnnnnnnnnnnnnnnnnnnnnnnnnnnnnnnnnnnnnnnnnnnnnnnnnnnnnnnnnnnnnnnnnnnnnnnnnnnnnnnnnnnnnnnnnnnnnnnnnnnnnnnnnnnnnnnnnnnnnnnnnnnnnnnnnnnnnnnnnnnnnnnnnnnnnnnnnnnnnnnnnnnnnnnnnnnnnnnnnnnnnnnnnnnnnnnnnnnnnnnnnnnnnnnnnnnnnnnnnnnnnnnnnnnnnnnnnnnnnnnnnnnnnnnnnnnnnnnnnnnnnnnnnnnnnnnnnnnnnnnnnnnnnnnnnnnnnnnnnnnnnnnnnnnnnnnnnnnnnnnnnnnnnnnnnnnnnnnnnnnnnnnnnnnnnnnnnnnnnnnnnnnnnnnnnnnnnnnnnnnnnnnnnnnnnnnnnnnnnnnnnnnnnnnnnnnnnnnnnnnnnnnnnnnnnnnnnnnnnnnnnnnnnnnnnnnnnnnnnnnnnnnnnnnnnnnnnnnnnnnnnnnnnnnnnnnnnnnnnnnnnnnnnnnnnnnnnnnnnnnnnnnnnnnnnnnnnnnnnnnnnnnnnnnnnnnnnnnnnnnnnnnnnnnnnnnnnnnnnnnnnnnnnnnnnnnnnnnnnnnnnnnnnnnnnnnnnnnnnnnnnnnnnnnnnnnnnnnnnnnnnnnnnnnnnnnnnnnnnnnnnnnnnnnnnnnnnnnnnnnnnnnnnnnnnnnnnnnnnnnnnnnnnnnnnnnnnnnnnnnnnnnnnnnnnnnnnnnnnnnnnnnnnnnnnnnnnnnnnnnnnnnnnnnnnnnnnnnnnnnnnnnnnnnnnnnnnnnnnnnnnnnnnnnnnnnnnnnnnnnnnnnnnnnnnnnnnnnnnnnnnnnnnnnnnnnnnnnnnnnnnnnnnnnnnnnnnnnnnnnnnnnnnnnnnnnnnnnnnnnnnnnnnnnnnnnnnnnnnnnnnnnnnnnnnnnnnnnnnnnnnnnnnnnnnnnnnnnnnnnnnnnnnnnnnnnnnnnnnnnnnnnnnnnnnnnnnnnnnnnnnnnnnnnnnnnnnnnnnnnnnnnnnnnnnnnnnnnnnnnnnnnnnnnnnnnnnnnnnnnnnnnnnnnnnnnnnnnnnnnnnnnnnnnnnnnnnnnnnnnnnnnnnnnnnnnnnnnnnnnnnnnnnnnnnnnnnnnnnnnnnnnnnnnnnnnnnnnnnnnnnnnnnnnnnnnnnnnnnnnnnnnnnnnnnnnnnnnnnnnnnnnnnnnnnnnnnnnnnnnnnnnnnnnnnnnnnnnnnnnnnnnnnnnnnnnnnnnnnnnnnnnnnnnnnnnnnnnnnnnnnnnnnnnnnnnnnnnnnnnnnnnnnnnnnnnnnnnnnnnnnnnnnnnnnnnnnnnnnnnnnnnnnnnnnnnnnnnnnnnnnnnnnnnnnnnnnnnnnnnnnnnnnnnnnnnnnnnnnnnnnnnnnnnnnnnnnnnnnnnnnnnnnnnnnnnnnnnnnnnnnnnnnnnnnnnnnnnnnnnngaagcggagtacatcgcgctcagtctggctatccaagaaggcaagtggattcatcacctgctatgcgagattctggcggccgctaatgagactggacccgaactcatgatccgcgaagacaaccagtcgtgcatcaagatgacgaagaacccagtgaaccacggtcgcgccaagcacatcgacatcaagtaccaccacatccgcgatgaagtcaagcgcggcgaagtcaagctccagcactgcgagacttctgtgatgctagcggacatcatgacgaaggcgcttgcgggaccacgccacacggatctgacggtggctctcggcattcgtgggacttcgcattgagggggcgtattgagggttgctggtcttgggtactgtgtaccagttgtattgagggttgctggtcttgggtactgtgtaccagttgtattgagggttgctggtcttgggtactgtgtaccagttgtacccattaaccggttaacccgaaccggtccaatccgaacccacgttgattatggtgattacggtaagttgtttacgccaccgatgattagacgagtaggatgattggatgaacaccggtgagtgatggttgattagatgcactaggtgataggacgcagggtcgcgtgtctataacagtagggtgtaagctccaacaattcaatcacttccgaatcttcattctacccctcaagtgccttcgctccggtcccgccgtctgcgacgtccctccccccgcttcgtccgagcttcgtgtccaagatccataccttccatcatcttcaggtcggtcttcgtgcgtgcgatcagctcgggcgaactcccggtaatcagtacgtcatccacgtacaccagtacaagcacgcagtgaccgtccaccaccttgatgtagaggcacggatcgaaggccgacacttggaagccgatggagcacacgaactcgtcgaaggtctcgttccacactcgcgaagcttgcttgagaccgtagatggccttcaccagttccaggcagtcgaagtcaccatccagttcgacgccttccggaaccacgcagaagaccacctccttcattatcccgtacaggaatgctgtcaccacgtcgagttggtcgaggggccagccaaaatacttagcaatcgcgatcaccatgcgcagcgtcacatacttgaccacgggcgagaacgtctcggtgtagtcaatgccgtacttctgcttgaagcccttggccacgaggcgcgccttgcacttctcgatcgagccgtccgctttgcgcttgatcttgaacacccacttggtatcgatggcgcgttgtccgttaggcaacttggcagctcgaaacacaccacgcagtcgcatcgacttgagctccgcgcggatcgctttgcgccagtgcacttgatcaggaccgttcacagcctcttggaacgtcgtcggctccgatagatcggctgctgcttccacaacgttggcactggcacgccaaaacactggaggcgtcgagtcgtcgtcttcatcttggtccccagacttttcttcttcgtcggggtcggctcggcgcgaggaggatacgtccggcgcacttgcttcttctaagccagctcggtggcgaacggggcgcgatcttctggcagtgttgtcgtcgccactcggtcggtacttgcgcttccccgcctgcttgaagctcgtttggcgcggtccatcgttgtcgtccaggtccagcgcgtccaagtccagcacagcatcatcgacgtcttcatccgaagtatgcgtcgaaagtccaaaggtcgactcatcgaagttgacatcgcgactgataaccacctgccccgcctcgatgtcataaactcgatacgccttggacacttcttcgtagccgaggaacagcccggcgcgagccttggggtcccacttgcgccgtctttccttcggcgtcaggatgtacgtctggcatccgaacacacgcatgtgcttcacactcggcttggacttgtaaacgatctcgaacggagtcttgtgttcgatcttgggtgatggcagacgattcttcaagtagatggctgtcatggccgcctcagcccagaagctcttgtccagcttggcatgatgcagcatgctgcggccaatcgtgacgatggtccggatggcgcgttctgccgtgccgttggtctggtgcgcgtgcggaaccgtggtttgctgctcgatgccttcgacttcgtagaaggccttgagcgagttggtcgcgaactcacgggctccgtcgtgccgcacaaacttgaccttcttgccgaactgcgtctgcaccttcgtgacgtacatcttgatgcagtcctcgctctccgacttggcacgcaggcagacccccttcatgcatccgctggcttcgtccaggatcagcaacagatacttgctgccacccagtgactcttcttccatggggccgcacacgtcgaagtggagcagctcgaacgtgtcgtagtgacgcttgtcacggttgcttgggaacggcttctggaccattttcccttgctggcagccgcgacacacgcttggtccactcgacttggaaggtgccttcgcgtccttgatcatgttgttgtcgaccatcttgcgaagcacctccaccggagcgtgacccatacgcgcgtgtaagtcgaccgtcttcccactggtcgccgcattcgccgatcgctgaggcgtctggagccagtagagtccatccacgaggtttgccgtcgccaccacttgcttggagcccttgtgcgcaatctgcatcttggtgctgtcgaacacgacttggaacagaccactcttgttgatctgtggcaccgaaagcagattcttgctcatgcttgggacgtacagcgcgttcttgatctcgatgtcgcgctcgtcgccgttgggcagaaccactcgttccacgatggtccccacacccatgatggccgccttgttgccgtcggccaccgaaagttcgccttcattccgctcaatcaaatgagcgaacttggcgttgtcgttgcagatgtggtgcgttgcgccgctgtcgaccgcccacaacccggacacattcttgcccgtcgaaatgccacactccagtgagaccgcgaacgccactcgatcatagccgtagtcgtagttgtagctggcgtcgtcgttcctccactgggcattgttggccccgcgtccacggccattgccattgccgccgcgtcttgggccccgattctcgtccttctgcttggtccagcacttgtcaatcgtgtgccccaatttcccgcagtacgtacactggcgagactctcggtcggtgttgaacgccttggccgcattctccgtcttcaccgtcgccgtcttctcgccttgtctcttgatgtgctcattcgtcagcaccttcacgacgtcttgcgatcgtagttcagcgctgctcatctccaagttcagcacgacgttctcgtagctcttggggaggctgcgcaacaggcagatcgccacgtcctcatcccccatcttggcgccgatgctgctgagcttggcgctgatgttgaggacctcgttgcaatgatgcaagacgttgccgccttccgacatctccatgctgaagagttggcgcttcaggtagatgcgtccagccttctgcgaaccaccgtacagcgtcttcaggcgcgtccacgcaacccacgcttcctcgcagtcgtcgaccacatggtggtagtccgcgtccatgtggagcaacatcagtccgaacgcgatgttgctcgacttgacgtagtcgtccttggcccgcgagtccgtgaagctcggcgtcgtctcgcggttcacgacatgccacgtcgacttggtcaggaacacgccacgcatgtagcggttccacgtcgcgtagttgtccccgttgaacttgtcaatggagaccttggtcgaggcgtcttgggcagaggacatggtgcttgggctcataacctgatggaaggtatggatcttggacacgaagctcggacgaagcggagggagggacgtcgcagacggcgggaccggagcgaaggcacttgaggggtagaatgaaaattcgaaagtgattgaattgttggagcttacaccctactgttatagacacgcgaccctgcgtcctatcacctagtgcatctaatcaaccatcactcaccggtgttcgtccaatcatcctactcgtctaatcatcggtggcataaacaacttaccgtaatcaccataatcaacgtggattcggattggaccggttcgggttaaccggttaatgggtacaactggtacacagtacccaagaccagcaaccctcaatacgccccctcaatgcgaagtcccacgaatgccgagagccaccgtcagatccgtgtggcgtggtcccgcaagcgccttcgtcatgatgtccgctagcatcacagaagtctcgcagtactggagcttgacttcgccgcgcttgacttcatcgcggatgtggtggtacttgatgtcgatgtgcttggcgcgaccgtggttcactgggttcttcgtcatcttgatgcacgactggttgtcttcgcggatcatgagttcgggtccagtctcattagcggccgccagaatctcgcatagcaggcgatgaatccacttgccttcttggatagccagactgagcgcgatgtactccgcttcattgcttcttgcttccccagctcacaggcgcactcatgagcatgaacgtgtagcctgaagtggacttgcggtcggcgaggtcgccggcccagtccgcgtccgagtagccacgaaagtcgatcttgtcgcccggcttgaagcagatcccatgcgtcttggtgccttgcaggtagcgaaagatacgcttgaccgcaacccagtgttcctcttgggggttctccatgaagcgcgatacatagccaacggcgtacgcgatgtctgggcgcgtggcggtcatcaggtgcatcagagcaccaacagcttcgcgaaacggagcgttcaccttggtcgccgcgtcgcttggaaccagtcgagtgctcatgtccaccggactcaccacggccttgcactcgtccatggcgaagcgcttcaggatgtcgtccacgtatcgccgctggcacatggtcacgctgccgtccgggccgtccaccaactcgatcccaagaacaaacgcgcacttgccgctgtcggtcatctcgaagcgcgtcttcaggtcggtcttcgtgcgtgcgatcagctcgggcgaactcccggtaatcagtacgtcatccacgtacaccagtacaagcacgcagtgaccgtccaccaccttgatgtagaggcacggatcgaaggccgacacttggaagccgatggagcacacgaactcgtcgaaggtctcgttccacactcgcgaagcttgcttgagaccgtagatggccttcaccagttccaggcagtcgaagtcaccatccagttcgacgccttccggaaccacgcagaagaccacctccttcattatcccgtacaggaatgctgtcaccacgtcgagttggtcgaggggccagccaaaatacttagcaatcgcgatcaccatgcgcagcgtcacatacttgaccacgggcgagaacgtctcggtgtagtcaatgccgtacttctgcttgaagcccttggccacgaggcgcgccttgtacttctcgatcgagccgtccgctttgcgcttgatcttgaacacccacttggtatcgatggcgcgttgtccgttaggcaacttggcagctcgaaacacaccacgcagtcgcatcgacttgagctccgcgcggatcgctttgcgccagtgcacttgatcaggaccgttcacagcctcttgggacgtcgtcggctccgatagatcggctgctgcttccacagcgttggcactggcacgccaaaacactggaggcgtcgagtcgtcgtcttcatcttggtccccagacgtttcttcttcgtcggggtcggctcggcgcgaggaggatacgtccggcgcacttgcttcttctaagccagctcggtggcgaacggggcgcgatcttctggcagtgttgtcgtcgccactcggtcggtacttgcgcttccccgcctgctggaagctcgtttggcgcggtccatcgttgtcgtccaggtccagcgcgtccaagtccagcacagcatcatcgacgtcttcatccgaagtatgcgtcgaaagtccaaaggtcgactcatcgaagttgacatcgcgactgataaccacctgccccgcctcgatgtcataaactcgatacgccttggacacttcttcgtagccgaggaacagcccggcgcgagccttggggtcccacttgcgccgtctttccttcggcgtcaggatgtacgtctggcattcgaacacacgcatgtgcttcacactcggcttggacttgtaaacgatctcgaacggagtcttgtgttcgatcttgggtgatggcagacgattcttcacgtagatggctgtcatggccgcctcagcccagaagctcttgtccagcttggcgtgatgcagcatgctgcggccaagcgtgacgatggtccggatggcgcgttctgccgtgccgttggtctggtgcgcgtacggaaccgtggtttgctgctcgatgccttcgacttcgtagaaggccttgagcgagttggtcgcgaactcacgggctccgtcgtgccgcacaaacttgaccttcttgccgaactgcgtctgcaccttcgtgacgtacatcttgatgcagtcctcgctctccgacttggcacgcaggcagaaccccttcatgcatccgctggcttcgtccacgatcagcagcagatacttgctgccacccagtgactcttcttccatggggccgcacacgtcgaagtggagcagctcgaacgtgtcgtagtgacgcttgtcacggttgcttgggaacggcttctggaccattttcccttgctggcagccgcgacacacgcttggtccactcgacttggaaggtgccttcgcgtccttgatcatgttgttgtcgaccatcttgcgaagcacctccaccggagcgtgacccatacgcgcgtgtaagtcgaccgtcttcccactggtcgccgcattcgccgatcgctgaggcgtctggagccagtagagtccatccacgaggtttgccgtcgccaccacttgcttggagcccttgtgcgcaatctgcatcttggtgctgtcgaacacgacttggaacagaccactcttgttgatctgtggcaccgaaagcagattcttgctcatgcttgggacgtacagcgcgttcttgatctcgatgtcgcgctcgtcgccgttgggcagaaccactcgttccacgatggtccccacacccatgatggccgccttgttgccgtcggccaccgaaagttcgccttcattccgctcaatcaaatgagcgaacttggccttgtcgttgcagatgcggtgcgttgcgccgctgtcgaccgcccacaacccggacacattcttgcccgtcgaaatgccacactccagtgagaccgcgaacgccactcgatcatagccgtagtcgtagttgtagctggcgtcgtcgttcctccactgggcattgttggccccgcgtccacggccattgccattgccgccgcgtcttgggccccgattctcgtccttctgcttggtccagcacttgtcaatcgtgtgccccaatttcccgcagtacgtacactggcgagactctcggtcggtgttgaacgccttggccgcattctccgtcttcaccgtcgccgtcttctcgccttgtctcttgatgtgctcattcgtcagcaccttcacgacgtcttgcgatcgtagttcagcgctgctcatctccaagttcagcacgacgttctcgtagctcttggggaggctgcgcaacaggcagatcgccacgtcctcatcctccatcttggcgccgatgctgctgagcttggcgctgatgttgaggacctcgttgcaatgatgcaagacgttgccgccttccgacatctccatgctgaagagttggcgcttcaggtagatgcgtccagccttctgcgaaccaccgtacagcgtcttcaggcgcgtccacgcaacccacgcttcctcgcagtcgtcgaccacatggtggtagtccgcgtccatgtggagcaacatcagtccgaacgcgatgttgctcgacttgacgtagtcgtccttggcccgcgagtccgtgaagctcggcgtcgtctcgcggttcacgacatgccacgtcgacttggtcaggaacacgccacgcatgtagcggttccacgtcgcgtagttgtccccgttgaacttgtcaatggagaccttggtcgaggcgtcttgggcagaggacatggtgcttgggctcataacctgatggaaggtatggatcttggacacgaagctcggacgaagcggagggagggacgtcgcagacggcgggaccggagcgaaggcacttgaggggtagaatgaagattcgaaagtgattgaattgttggagcttacaccctactgttatagacacgcgaccctgcgtcctatcacctagtgcatctaatcaaccatcactcaccggtgttcatccaatcatcctactcgtctaatcatcggtggcgtaaacaacttaccgtaatcaccataatcaacgtgggttcggattggaccggttcgggttaaccggttaatgggtacaactggtatacagtacccaagaccagcaaccctcaatatattggcccggtatgtacgccgatgtcgaacgttttgtgaaggagtgtgtcgattgtgcaagcggaaaggggcgacctcccaatcctggaccgtcgcctggtaacatcgagcctcgacgaccattcgaagtagtgtctatggattttgtgacgcacatgcccaagtcagcacggggaaacactttcctgctgttgttccaagattcattctctggctacgtgatgtgtaaacccatgtcgtctacgacggcacaggatgtcgctgaggcatacgaagagcgagtctttcggaattttggtgcgtcgtcgatgatcagacacgataaggtcctcgcttcatgagtgaggtgttcactcgttttcgggagctgttgggtagccgtcaacgtgtgaccctggcctaggcgaacggccaacaggagcggtccgtccagaccgtcatttggagcgtccgtgcctacattgccgaagcagaccagtctgactgggatgaccatgcagaacgactgatgttcgcactgaatacctctttcgacgcgaccagactggatacaccattctatctggtacacggttgggacgcacagggaacggtgtcggcgatgctagggccaaagccatccagtgtgcctgagcgtacagcatacgagtggcgtcgaaagtttcagcgcgactacagctacgcgatcgcatgtgccgaagatcttcagaaacaggcgaaacggacacgatctgaggagcagacacgaaagtggaaagaactctccgaacgattgaagaccggattcgagaagggagattcggtatggctttacatccccaaggtccagacaggactgagccgcaagttggctcacatgtggcacgggccgttcaggatcgacgaagttcatgacgacttccgcgtgaagctcaaggttgaggacacaggataccgcgtcaacccgtgggtacacatcagtcgccttaaacctcgagcgctgttcccgaaacgacctaccgtagcgctcgaactggatgacgacgacgatttcgatgcggcgttgttgcctgaggatagctgggagccggacgaacagaatgccgagtacgaagtggaaaagattctggacctccggtggactaaacgtacgcgcacgtccaagcgaattcgcgagtaccaggtcaagtggaaaggatatgatgatccggagtggttgccagtaacccagctcaactgtggtgcacttctctatgaatttaaccagagtgcccgcgctaaggcccggttccagtctatgcaggctggtgatgatcacctcagtgtctagcacaccggatgactcggccgatcctgaccgcggatgtgtgaaccgactgaacctgaatgtgatttttgattgtggatttgatagtgacgacgcatggatattgtgaatgagactgagtgttagcagacagaatggacaagtgatcgtgaagtgaacgagtgtgaacggaccgaatctggagcagccagactgaatgagtgacaagggaacgaaagacaagtgatgaacatgaggagtgtggaattatgcagttagcggaaagcgacaccgaatgtgcgactagttttggtgctcgacagagacccagttgccgcgcagctcgtttggaggcaggatcatgtctcggatctcgtgaggacgaacagcgacgaggtcgttggtggaccatccggtccactggatgcgggcgggttccgcgcggtccaggatcgccagctgctccatcattgtgtatggctcggtgccgaggtttgtctccgaccggtcgaacaggatccggtgacacagcttggcggggtacacccaaatgcctggttcgtgcaggatggtcttgggcgctccagacactttcagcttggcgatcaacttgttgtagtccttgatggccgcgtcatgaagtttcttgcgtgccacctgggccttggcggcctccacgctgtccgcatcgaacgtgacccagtgaccggcgtgccagaaagtcagccgttctctttcatgtaggtcacgacctcggacagaacctcgagagtgctatccggtagcgtgctgcgcttgtggaacaaaaggtgttcgacgcgtcgtcggaacatgcgcccaccaggattgctatccagaatgacctcatactcgtcgggccggaaccgctccttcagaggtttcgaaccaccattgtggttcggtgcgtaatcgggaaacccgggagactggtcgacagcgttgaccgttattgagggttgctggtcttgggtactgtgtaccagttgtacccattaaccggttaacccgaaccggtccaatccgaacccacgttgattatggtgattacggtaagttgtttaggccaccgatgattagacgagtaggatgattggatgaacaccggtgagtgatggttgattagatgcactaggtgataggacgcagggtcgcgtgtctataacagtagggtgtaagctccaacaattcaatcactttcgaatcttcattctacccctcaagtgccttcgctccggtcccgccgtctgcgacgtccctccctccgcttcgtccgagcttcgtgtccaagatccataccttccatcaggttatgagcccaagcaccatgtcctctgcccaagacgcctcgaccaaggtctccattgacaagttcaacggggacaactacgcgacgtggaaccgctacatgcgtggcgtgttcctgaccaagtcgacgtggcatgtcgtgaaccgcgagacgacgccgagcttcacggactcgcgggccaaggacgactacgtcaagtcgagcaacatcgcgttcggactgatgttgctccacatggacgcggactaccaccatgtggtcgacgactgcgaggaagcgtgggttgcgtggacgcgcctgaagacgctgtacggtggttcgcagaaggctggacgcatctacctgatgcgccaactcttcagcatggagatgtcggaaggcggcaacgtcttgcatcattgcaacgaggtcctcaacatcagcgccaagctcagcagcatcggcgccaagatggaggatgaggacgtggcgatctgcctgttgcgcagcctccccaagagctacgagaacgtcgtgctgaacttggagatgagcagcgctgaactacgatcgcaagacgtcgcgaaggtgctgacgaatgagcacatcaagagacaaggcgagaagacggcgacggtgaagacggagaatgcggccaaggcgttcaacaccgaccgagagtctcgccagtgtacgtactgcgggaaattggggcacacgattgacaagtgctggaccaagcagaaggacgagaatcggggcccaagacgcggcggcaatggcaatggccgtggacgcggggccaacaatgcccagtggaggaacgacgacgccagctacaactacgactacggctatgatcgagtggcgttcgcggtctcactggagtgtggcatttcgacgggcaagaatatgtccgggttgtgggcggtcgacagcggcggaacgcaccacatctgcaacgacaataacgacaaggccaagttcgctcatttgattgagcggaatgaaggcgaactttcggtggccgacggcaacaaggcggccatcatgggtgtggggaccatcgtggaacgagtggttctgcccaacggcgacgagcgcgacatcgagatcaagaacgcgctgtacgtcccaagcatgagcaagaatctgctttcggtgccacagatcaacaagagtggtctgttccaagtcgtgttcgacagcaccaagatgcagattgcgcacaagggctccaagcaagtggtggcgacggcaaacctcgtggatggactctactggctccagacgcctcagcgatcggcgaatgcggcgaccagtgggaagacggtcgacttacacgcgcgtatgggtcacgctccggtggaggtgcttcgcaagatggtcgacaacaacatgatcaaggacgcgaaggcaccttccaagtcgagtggaccaagcgtgtgtcgcggctgccagcaagggaaaatggtccagaagccgttcccaagcaaccgtgacaagcgtcactacgacacgttcgagctgctccacttcgacgtgtgcggccccatggaagaagagtcactgggtggcagcaagtacctgctgctgatcgtggacgaagccagcggatgcatgaaggggttctgtctgcgtgccaagtcggagagcgaggactgcatcaagatgtacgtcacgaaggtgcagacgcagttcggcaagaaggtcaagtttgtgcggcacgacggagcccgtgagttcgcgaccaactcgctcaaggccttctacgaagtcgaaggcatcgagcagcaaaccacggttccgtacgcgcaccagaccaacggcacggcagaacgcgccatccggaccatcgtcacgattggccgcagcatgctgcatcacgccaagctggacaagagcttctgggctgaggcggccatgacagccatctacgtgaagaatcgtctgccatcacccaagatcgaacacaagactccgttcgagatcgtttacaagtccaagccgagtgtgaagcacatgcgtgtgttcggatgccagacgtacatcctgacgccgaaggaaagacggcgcaagtgggaccccaaggctcgcgccgggctgttcctcggctacgaagaagtgtccaaggcgtatcgagtttatgacatcgaggcggggcaggtggttatcagtcgcgatgtcaacttcgatgagtcgacctttggactttcgacgcatacttcggatgaagacgtcgatgatgctgtgctggacttggacgcgctggacctggacgacaacgatggaccgcgccaaacgagcttcaagcaggcggggaagcgcaagtaccgaccgagtggcgacgacaacactgccagaagatcgcgccccgttcgccaccgagctggcttagaagaagcaagtgcgccggacgtatcctcctcgcgccgagccgaccccgacgaagaagaaaagtctggggaccaagatgaagacgacgactcgacacctccagtgttttggcgtgccagtgccaacgctgtggaagcagcagccgatctatcggagccgacgacgttccaagaggctgtgaacggtcctgatcaagtgcactggcgcaaagcgatccgcgcggagctcaagtcgatgcgactgcgtggtgtgtttcgagctgccaagttgcctaacggacaacgcgccatcgataccaagtgggtgttcaagatcaagcgcaaagcggacggctcgatcgagaagtacaaggcgcgcctcgtggccaagggcttcaagcagaagtacggcattgactacaccgagacgttctcgcccgtggtcaagtatgtgacactgcgcatggtgatcgcgattgctaagtattttggctggcccctcgaccaactcgacgtggtgacagcattcctgtacgggataatgaaggaggtggtcttctgcgtggttccggaaggcgtcgaactggatggtgacttcgactgcctggaactggtgaaggtcatctacggtctcaagcaagcttcgcgagtgtggaacgagaccttcgacgagttcgtgtgctccatcggcttccaagtgtcggccttcgatccgtgcctctacatcaaggtggtggacggtcactgcgtgcttgtactggtgtacgtggatgacgtactgattaccggaagttcgcccgagctgatcgcacgcacgaagaccgacctgaagacgcgcttcgagatgaccgacagcggcaagtgcgcgtttgttcttgggatcgagttggtggacggcctggacggcagcgtgaccatgtgccagcggcgatacgtggacgacatcctgaagcgcttcgccatggacgagtgcaaggccgtggtgagtccggtggacatgagcactcgactggttccaagcgacgcggcgaccaaggtgaacgctccgtttcgcgaagctgttggtgctctgatgcacctgatgaccgccacgcgcccagacatcgcgtacgccgttggctatgtatcgcgcttcatggagaacccccaagaggaacactgggttgcggtcaagcgtatctttcgctacctgcaaggcaccaagacgcatgggatctgcttcaagccgggcgacaagatcgactttcgtggctactcggacgcggactgggccggcgacctcgccgaccgcaagtccacttcaggctacacgttcatgctcatgagtgcgcctgtgagctggggaagcaagaagcaatgaagcggagtacatcgcgctcagtctggctatccaagaaggcaagtggattcatcgcctgctatgcgagattctggcggccgctaatgagactggacccgaactcatgatccgcgaagacaaccagtcgtgcatcaagatgacgaagaacccagtgaaccacggtcgcgccaagcacatcgacatcaagtaccaccacatccgcgatgaagtcaagcgcggcgaagtcaagctccagtactgcgagacttctgtgatgctagcggacatcatgacgaaggcgcttgcgggaccacgccacacggatctgacggtggctctcggcattcgtgggacttcgcattgagggggcgtattgagggttgctggtcttgggtactgtgtaccagttgtacccattaaccggttaacccgaaccggtccaatccgaacccacgttgattatggtgattacggtaagttgtttacgccaccgatgattagacgagtaggatgattggatgaacaccggtgagtgatggttgattagatgcactaggtgataggacgcagggtcgcgtgtctataacagtagggtgtaagctccaacaattcaatcactttcgaatcttcattctacccctcaagtgccttcgctccggtcccgccgtctgcgacgtccctccctccgcttcgtccgagcttcgtgtccaagatccataccttccatcaagcggaatgaaggcgaactttcggtggccgacggcaacaaggcggccaccatggttgtggggaccatcgtggaacgagtggttctgcccaacggcgacgagcgcgacatcgagatcaagaacgcgctgtacgtcccaagcatgagcaagaatctgctttcggtgccacagatcaacaagagtggcctgttccaagtcgtgttcgacagcaccaagatgcagattgcgcacaagggctccaagcaagtggtggcgacggcaaacctcgtggatggactctactggctccagacgcctcagcgatcggcgaatgcggcgaccagtgggaagacggtcgacttacacgcgcgtatgggtcacgctccggtggaggtgcttcgcaagatggtcgacaacaacatgatcaaggacgcgaaggcaccttccaagtcgagtggaccaagcgtgtgtcgcggctgccagcaagggaaaatggtccagaagccgttcccaagcaaccgtgacaagcgtcactacgacacgttcgagctgctccacttcgacgtgtgcggacccatggaagaagagtcactgggtggcagcaagtatctgctgctgatcgtggacgaagccagcggatgcatgaaggggttctgcctgcgtgccaagtcggagagcgaggactgcatcaagatgtacgtcacgaaggtgcagacgcagttcggcaagaaggtcaagtttgtgcggcacgacggagcccgtgagttcgcgaccaactcgctcaaggccttctacgaagtcgaaggcatcgagcagcaaaccacggttccgtacgcgcaccagaccaacggcacggcagaacgcgccatccggaccatcgtcacgattggccgcagcatgctgcatcacgccaagctggacaagagcttctgggctgaggcggccatgacagccatctacgtgaagaatcgtctgccatcacccaagatcgaacacaagactccgttcgagatcgtttacaagtccaagccgagtgtgaagcacatgcgtgtgttcggatgccagacgtacatcctgacgccgaaggaaagacggcgcaagtgggaccccaaggctcgcgccgggctgttcctcggctacgaagaagtgtccaaggcatatcgagtttatgacatcgaggcggggcaggtggttatcagtcgcgatgtcaacttcgatgagtcgacctttggactttcgacgcatacttcggatgaagacgtcgatgatgctgtgttggacttggacgcgctggacctggacgacaacgatggaccgcgccaaacgagcttcaagcaggcggggaagcgcaagtaccgaccgagtggcgacgacaacactgccagaagatcgcgccccgttcgtcaccgagctggcttagaagaagcaagtgcgccggacgtatcctcctcgcgccgagccgaccccgacgaagaagaaaagtctggggaccaagatgaagacgacgactcgacgcctccagtgttttggcgtgccagtgccaacgctgtggaagcagcagccgatctatcggagccgacgacgttccaagaggctgtgaacggtcctgatcaattgcactggcgcaaagcgatccgcgcggagctcaagtcgatgcgactgcgtggtgtgtttcgagctgccaagttgcctaacggacaacgcgccatcgataccaagtgggtgttcaagatcaagcgcaaagcggacggctcgatcgagaagtacaaggcgcgcctcgtggccaagggcttcaagcagaagtacggcattgactacaccgagacgttctcgcccgtggtcaagtatgtgacgctgcgcatggtgatcgcaattgctaagtattttggctggcccctcgaccaactcgacgtggtgacggcattcctgtacgggataatgaaggaggtggtcttctgcgtggttccggaaggcgtcgaactgaatggtgacttcgactgcctggaactggtgaaggccatctacggtctcaagcaagcttcgcgagtgtggaacgagaccttcgacgagttcgtgtgctccatcggcttccaagtgtcggccttcgatccgtgcctctacatcaaggtggtggacggtcactgcgtgcttgtactggtgtacgtggatgacgtactgattaccgggagttcgcccgagctgatcgcacgcacgaagaccgacctgaagacgcgcttcgagatgaccgacagcggcaagtgcgcgtttgttcttgggatcgagttggtggacggcccggacggcagcgtgaccatgtgccagcggcgatacgtggacgacatcctgaagcgcttcgccatggacgagtgcaaggccgtggtgagtccggtggacatgagcactcgactggttccaagcgacgcggcgaccaaggtgaacgctccgtttcgcgaagctgttggtgctctgatgcacctgatgaccgccacgcgcccagacatcgcgtacgccgttggctatgtatcgcgcttcatggagaacccccaagaggaacactgggttgcggtcaagcgtatctttcgatacctgcaaggcaccaagacgcatgggatctgcttcaagccgggcgacaagatcgactttcgtggctactcggacgcggactgggccggcgacctcgccgaccgcaagtccacttcaggctacacgttcatgctcatgagtgcgcctgtgagctggggaagcaagaagcaatgaagcggagtacatcgcgctcagtctggctatccaagaaggcaagtggattcatcgcctgctatgcgagattctggcggccgctaatgagactggacccgaactcatgatccgcgaagacaaccagtcgtgcatcaagatgacgaagaacccagtgaaccacggtcgcgccaagcacatcgacatcaagtaccaccacatccgcgatgaagtcaagcgcggcgaagtcaagctccagtactgcgagacttctgtgatgctagcggacatcatgacgaaggcgcttgcgggaccacgccacacggatctgacggtggctctcggcattcgtgggacttcgcattgagggggcgtattgagggttgctggtcttgggtactgtgtaccagttatacccattaaccggttaacccgaaccggtccaatccgaacccacgttgattatggtgattacggtaagttgtttacgccaccgatgattagacgagtaggatgattggatgaacaccggtgagtgatggttgattagatgcactaggtgataggacgcagggtcgcgtgtctataacagtagggtgtaagctccaacaattcaatcactttcgaatcttcattctacccctcaagtgccttcgctctggtcccgccgtctgcgacgtccctccctccgcttcgtcagagcttcgtgtccaagatccataccttccatcaggttatgagcccaagcaccatgtcctctgcccaagacgcctcgaccaaggtctccattgacaagttcaacggggacaactacgcgacgtggaaccgctacatgcgtggcgtgttcctgaccaagtcgacgtggcatgtcgtgaaccgcgagacgacgccgagcttcacggactcgcgggccaaggacgactacgtcaagtcgagcaacatcgcgttcggactgatgttgctccacatggacgcggactaccaccatgtggtcgacgactgcgaggaagcgtgggttgcgtggacgcgcctgaagacgctgtacggtggttcgcagaaggctggacgcatctacctgaagcgccaactcttccgcatggagatgtcggaaggcggcaacgtcttgcatcattgcaacgaggtcctcaacatcagcgccaagctcagcagcatcggcgccaagatggaggatgaggacgtggcgatctgcctgttgcgcagcctccccaagagctacgagaacgtcgtgctgaacttggagatgagcagcgctgaactacgatcgcaatacgtcgtgaaggtgctgacgaatgagcacatcaagagacaaggcgagaagacggcgacggtgaagacggagaatgcggccaaggcgttcaacaccgaccgagagtctcgccagtgtacgtactgcgggaaattggggcacacgattgacaagtgctggaccaagcagaaggacgagaatcggggcccaagacgcggcggcaatggcaatggccgtggacgcggggccaacaatgcccagtggaggaacgacgacgccagctacaactacgactacggctatgatcgagtggcgttcgcggtctcactggagtgtggcatttcgacgggcaagaatgtgtccgggttgtgggcggtcgacagcggcgcaacgcaccacatctgcaacgacaaggccaagttcgctcatttgattgagcggaatgaaggcgaactttcggtggccgacggcaacaaggcggccatcatgggtgtggggaccatcgtggaacgagtggttctgcccaacggcgacgagcgcgacatcgagatcaagaacgcgctgtacgtcccaagcatgagcaagaatctgctttcggtgccacagatcaacaagagtggtctgttccaagtcgtgttcgacagcaccaagatgcagattgcgcacaagggctccaagcaagtggtggcgacggcaaacctcgtggatggactctactggctccagacgcctcagcgatcggcgaatgcggcgaccagtgggaagacggtcgacttacacgcgcgtatgggtcacgctccggtggaggtgcttcgcaagatggtcgacaacaacatgatcaaggacgcgaaggcaccttccaagtcgagtggaccaagcgtgtgtcgcggctgccagcaagggaaaatggtccagaagccgttcccaagcaaccgtgacaagcgtcactacgacacgttcgagctgctccacttcgacgtgtgcggccccatggaagaagagtcactgggtggcagcaagtatctgctgctgatcgtggacgaagccagcggatgcatgaaggggttctgcctgcgtgccaagtcggagagcgaggactgcatcaagatgtacgtcacgaaggtgcagacgcagttcggcaagaaggtcaagtttgtgcggcacgacggagcccgtgagttcgcgaccaactcgctcaaggccttctacgaagtcgaaggcatcgagcagcaaaccacggttccgtacgcgcaccagaccaacggcacggcagaacgcgccatccggaccatcgtcacgattggccgcagcatgctgcatcacgccaagctggacaagagcttctgggctgatgcggccatgacagccatctacgtgaagaatcttctgccatcacccaagatcgaacacaagactcnnnnnnnnnnnnnnnnnnnnnnnnnnnnnnnnnnnnnnnnnnnnnnnnnnnnnnnnnnnnnnnnnnnnnnnnnnnnnnnnnnnnnnnnnnnnnnnnnnnnnnnnnnnnnnnnnnnnnnnnnnnnnnnnnnnnnnnnnnnnnnnnnnnnnnnnnnnnnnnnnnnnnnnnnnnnnnnnnnnnnnnnnnnnnnnnnnnnnnnnnnnnnnnnnnnnnnnnnnnnnnnnnnnnnnnnnnnnnnnnnnnnnnnnnnnnnnnnnnnnnnnnnnnnnnnnnnnnnnnnnnnnnnnnnnnnnnnnnnnnnnnnnnnnnnnnnnnnnnnnnnnnnnnnnnnnnnnnnnnnnnnnnnnnnnnnnnnnnnnnnnnnnnnnnnnnnnnnnnnnnnnnnnnnnnnnnnnnnnnnnnnnnnnnnnnnnnnnnnnnnnnnnnnnnnnnnnnnnnnnnnnnnnnnnnnnnnnnnnnnnnnnnnnnnnnnnnnnnnnnnnnnnnnnnnnnnnnnnnnnnnnnnnnnnnnnnnnnnnnnnnnnnnnnnnnnnnnnnnnnnnnnnnnnnnnnnnnnnnnnnnnnnnnnnnnnnnnnnnnnnnnnnnnnnnnnnnnnnnnnnnnnnnnnnnnnnnnnnnnnnnnnnnnnnnnnnnnnnnnnnnnnnnnnnnnnnnnnnnnnnnnnnnnnnnnnnnnnnnnnnnnnnnnnnnnnnnnnnnnnnnnnnnnnnnnnnnnnnnnnnnnnnnnnnnnnnnnnnnnnnnnnnnnnnnnnnnnnnnnnnnnnnnnnnnnnnnnnnnnnnnnnnnnnnnnnnnnnnnnnnnnnnnnnnnnnnnnnnnnnnnnnnnnnnnnnnnnnnnnnnnnnnnnnnnnnnnnnnnnnnnnnnnnnnnnnnnnnnnnnnnnnnnnnnnnnnnnnnnnnnnnnnnnnnnnnnnnnnnnnnnnnnnnnnnnnnnnnnnnnnnnnnnnnnnnnnnnnnnnnnnnnnnnnnnnnnnnnnnnnnnnnnnnnnnnnnnnnnnnnnnnnnnnnnnnnnnnnnnnnnnnnnnnnnnnnnnnnnnnnnnnnnnnnnnnnnnnnnnnnnnnnnnnnnnnnnnnnnnnnnnnnnnnnnnnnnnnnnnnnnnnnnnnnnnnnnnnnnnnnnnnnnnnnnnnnnnnnnnnnnnnnnnnnnnnnnnnnnnnnnnnnnnnnnnnnnnnnnnnnnnnnnnnnnnnnnnnnnnnnnnnnnnnnnnnnnnnnnnnnnnnnnnnnnnnnnnnnnnnnnnnnnnnnnnnnnnnnnnnnnnnnnnnnnnnnnnnnnnnnnnnnnnnnnnnnnnnnnnnnnnnnnnnnnnnnnnnnnnnnnnnnnnnnnnnnnnnnnnnnnnnnnnnnnnnnnnnnnnnnnnnnnnnnnnnnnnnnnnnnnnnnnnnnnnnnnnnnnnnnnnnnnnnnnnnnnnnnnnnnnnnnnnnnnnnnnnnnnnnnnnnnnnnnnnnnnnnnnnnnnnnnnnnnnnnnnnnnnnnnnnnnnnnnnnnnnnnnnnnnnnnnnnnnnnnnnnnnnnnnnnnnnnnnnnnnnnnnnnnnnnnnnnnnnnnnnnnnnnnnnnnnnnnnnnnnnnnnnnnnnnnnnnnnnnnnnnnnnnnnnnnnnnnnnnnnnnnnnnnnnnnnnnnnnnnnnnnnnnnnnnnnnnnnnnnnnnnnnnnnnnnnnnnnnnnnnnnnnnnnnnnnnnnnnnnnnnnnnnnnnnnnnnnnnnnnnnnnnnnnnnnnnnnnnnnnnnnnnnnnnnnnnnnnnnnnnnnnnnnnnnnnnnnnnnnnnnnnnnnnnnnnnnnnnnnnnnnnnnnnnnnnnnnnnnnnnnnnnnnnnnnnnnnnnnnnnnnnnnnnnnnnnnnnnnnnnnnnnnnnnnnnnnnnnnnnnnnnnnnnnnnnnnnnnnnnnnnnnnnnnnnnnnnnnnnnnnnnnnnnnnnnnnnnnnnnnnnnnnnnnnnnnnnnnnnnnnnnnnnnnnnnnnnnnnnnnnnnnnnnnnnnnnnnnnnnnnnnnnnnnnnnnnnnnnnnnnnnnnnnnnnnnnnnnnnnnnnnnnnnnnnnnnnnnnnnnnnnnnnnnnnnnnnnnnnnnnnnnnnnnnnnnnnnnnnnnnnnnnnnnnnnnnnnnnnnnnnnnnnnnnnnnnnnnnnnnnnnnnnnnnnnnnnnnnnnnnnnnnnnnnnnnnnnnnnnnnnnnnnnnnnnnnnnnnnnnnnnnnnnnnnnnnnnnnnnnnnnnnnnnnnnnnnnnnnnnnnnnnnnnnnnnnnnnnnnnnnnnnnnnnnnnnnnnnnnnnnnnnnnnnnnnnnnnnnnnnnnnnnnnnnnnnnnnnnnnnnnnnnnnnnnnnnnnnnnnnnnnnnnnnnnnnnnnnnnnnnnnnnnnnnnnnnnnnnnnnnnnnnnnnnnnnnnnnnnnnnnnnnnnnnnnnnnnnnnnnnnnnnnnnnnnnnnnnnnnnnnnnnnnnnnnnnnnnnnnnnnnnnnnnnnnnnnnnnnnnnnnnnnnnnnnnnnnnnnnnnnnnnnnnnnnnnnnnnnnnnnnnnnnnnnnnnnnnnnnnnnnnnnnnnnnnnnnnnnnnnnnnnnnnnnnnnnnnnnnnnnnnnnnnnnnnnnnnnnnnnnnnnnnnnnnnnnnnnnnnnnnnnnnnnnnnnnnnnnnnnnnnnnnnnnnnnnnnnnnnnnnnnnnnnnnnnnnnnnnnnnnnnnnnnnnnnnnnnnnnnnnnnnnnnnnnnnnnnnnnnnnnnnnnnnnnnnnnnnnnnnnnnnnnnnnnnnnnnnnnnnnnnnnnnnnnnnnnnnnnnnnnnnnnnnnnnnnnnnnnnnnnnnnnnnnnnnnnnnnnnnnnnnnnnnnnnnnnnnnnnnnnnnnnnnnnnnnnnnnnnnnnnnnnnnnnnnnnnnnnnnnnnnnnnnnnnnnnnnnnnnnnnnnnnnnnnnnnnnnnnnnnnnnnnnnnnnnnnnnnnnnnnnnnnnnnnnnnnnnnnnnnnnnnnnnnnnnnnnnnnnnnnnnnnnnnnnnnnnnnnnnnnnnnnnnnnnnnnnnnnnnnnnnnnnnnnnnnnnnnnnnnnnnnnnnnnnnnnnnnnnnnnnnnnnnnnnnnnnnnnnnnnnnnnnnnnnnnnnnnnnnnnnnnnnnnnnnnnnnnnnnnnnnnnnnnnnnnnnnnnnnnnnnnnnnnnnnnnnnnnnnnnnnnnnnnnnnnnnnnnnnnnnnnnnnnnnnnnnnnnnnnnnnnnnnnnnnnnnnnnnnnnnnnnnnnnnnnnnnnnnnnnnnnnnnnnnnnnnnnnnnnnnnnnnnnnnnnnnnnnnnnnnnnnnnnnnnnnnnnnnnnnnnnnnnnnnnnnnnnnnnnnnnnnnnnnnnnnnnnnnnnnnnnnnnnnnnnnnnnnnnnnnnnnnnnnnnnnnnnnnnnnnnnnnnnnnnnnnnnnnnnnnnnnnnnnnnnnnnnnnnnnnnnnnnnnnnnnnnnnnnnnnnnnnnnnnnnnnnnnnnnnnnnnnnnnnnnnnnnnnnnnnnnnnnnnnnnnnnnnnnnnnnnnnnnnnnnnnnnnnnnnnnnnnnnnnnnnnnnnnnnnnnnnnnnnnnnnnnnnnnnnnnnnnnnnnnnnnnnnnnnnnnnnnnnnnnnnnnnnnnnnnnnnnnnnnnnnnnnnnnnnnnnnnnnnnnnnnnnnnnnnnnnnnnnnnnnnnnnnnnnnnnnnnnnnnnnnnnnnnnnnnnnnnnnnnnnnnnnnnnnnnnnnnnnnnnnnnnnnnnnnnnnnnnnnnnnnnnnnnnnnnnnnnnnnnnnnnnnnnnnnnnnnnnnnnnnnnnnnnnnnnnnnnnnnnnnnnnnnnnnnnnnnnnnnnnnnnnnnnnnnnnnnnnnnnnnnnnnnnnnnnnnnnnnnnnnnnnnnnnnnnnnnnnnnnnnnnnnnnnnnnnnnnnnnnnnnnnnnnnnnnnnnnnnnnnnnnnnnnnnnnnnnnnnnnnnnnnnnnnnnnnnnnnnnnnnnnnnnnnnnnnnnnnnnnnnnnnnnnnnnnnnnnnnnnnnnnnnnnnnnnnnnnnnnnnnnnnnnnnnnnnnnnnnnnnnnnnnnnnnnnnnnnnnnnnnnnnnnnnnnnnnnnnnnnnnnnnnnnnnnnnnnnnnnnnnnnnnnnnnnnnnnnnnnnnnnnnnnnnnnnnnnnnnnnnnnnnnnnnnnnnnnnnnnnnnnnnnnnnnnnnnnnnnnnnnnnnnnnnnnnnnnnnnnnnnnnnnnnnnnnnnnnnnnnnnnnnnnnnnnnnnnnnnnnnnnnnnnnnnnnnnnnnnnnnnnnnnnnnnnnnnnnnnnnnnnnnnnnnnnnnnnnnnnnnnnnnnnnnnnnnnnnnnnnnnnnnnnnnnnnnnnnnnnnnnnnnnnnnnnnnnnnnnnnnnnnnnnnnnnnnnnnnnnnnnnnnnnnnnnnnnnnnnnnnnnnnnnnnnnnnnnnnnnnnnnnnnnnnnnnnnnnnnnnnnnnnnnnnnnnnnnnnnnnnnnnnnnnnnnnnnnnnnnnnnnnnnnnnnnnnnnnnnnnnnnnnnnnnnnnnnnnnnnnnnnnnnnnnnnnnnnnnnnnnnnnnnnnnnnnnnnnnnnnnnnnnnnnnnnnnnnnnnnnnnnnnnnnnnnnnnnnnnnnnnnnnnnnnnnnnnnnnnnnnnnnnnnnnnnnnnnnnnnnnnnnnnnnnnnnnnnnnnnnnnnnnnnnnnnnnnnnnnnnnnnnnnnnnnnnnnnnnnnnnnnnnnnnnnnnnnnnnnnnnnnnnnnnnnnnnnnnnnnnnnnnnnnnnnnnnnnnnnnnnnnnnnnnnnnnnnnnnnnnnnnnnnnnnnnnnnnnnnnnnnnnnnnnnnnnnnnnnnnnnnnnnnnnnnnnnnnnnnnnnnnnnnnnnnnnnnnnnnnnnnnnnnnnnnnnnnnnnnnnnnnnnnnnnnnnnnnnnnnnnnnnnnnnnnnnnnnnnnnnnnnnnnnnnnnnnnnnnnnnnnnnnnnnnnnnnnnnnnnnnnnnnnnnnnnnnnnnnnnnnnnnnnnnnnnnnnnnnnnnnnnnnnnnnnnnnnnnnnnnnnnnnnnnnnnnnnnnnnnnnnnnnnnnnnnnnnnnnnnnnnnnnnnnnnnnnnnnnnnnnnnnnnnnnnnnnnnnnnnnnnnnnnnnnnnnnnnnnnnnnnnnnnnnnnnnnnnnnnnnnnnnnnnnnnnnnnnnnnnnnnnnnnnnnnnnnnnnnnnnnnnnnnnnnnnnnnnnnnnnnnnnnnnnnnnnnnnnnnnnnnnnnnnnnnnnnnnnnnnnnnnnnnnnnnnnnnnnnnnnnnnnnnnnnnnnnnnnnnnnnnnnnnnnnnnnnnnnnnnnnnnnnnnnnnnnnnnnnnnnnnnnnnnnnnnnnnnnnnnnnnnnnnnnnnnnnnnnnnnnnnnnnnnnnnnnnnnnnnnnnnnnnnnnnnnnnnnnnnnnnnnnnnnnnnnnnnnnnnnnnnnnnnnnnnnnnnnnnnnnnnnnnnnnnnnnnnnnnnnnnnnnnnnnnnnnnnnnnnnnnnnnnnnnnnnnnnnnnnnnnnnnnnnnnnnnnnnnnnnnnnnnnnnnnnnnnnnnnnnnnnnnnnnnnnnnnnnnnnnnnnnnnnnnnnnnnnnnnnnnnnnnnnnnnnnnnnnnnnnnnnnnnnnnnnnnnnnnnnnnnnnnnnnnnnnnnnnnnnnnnnnnnnnnnnnnnnnnnnnnnnnnnnnnnnnnnnnnnnnnnnnnnnnnnnnnnnnnnnnnnnnnnnnnnnnnnnnnnnnnnnnnnnnnnnnnnnnnnnnnnnnnnnnnnnnnnnnnnnnnnnnnnnnnnnnnnnnnnnnnnnnnnnnnnnnnnnnnnnnnnnnnnnnnnnnnnnnnnnnnnnnnnnnnnnnnnnnnnnnnnnnnnnnnnnnnnnnnnnnnnnnnnnnnnnnnnnnnnnnnnnnnnnnnnnnnnnnnnnnnnnnnnnnnnnnnnnnnnnnnnnnnnnnnnnnnnnnnnnnnnnnnnnnnnnnnnnnnnnnnnnnnnnnnnnnnnnnnnnnnnnnnnnnnnnnnnnnnnnnnnnnnnnnnnnnnnnnnnnnnnnnnnnnnnnnnnnnnnnnnnnnnnnnnnnnnnnnnnnnnnnnnnnnnnnnnnnnnnnnnnnnnnnnnnnnnnnnnnnnnnnnnnnnnnnnnnnnnnnnnnnnnnnnnnnnnnnnnnnnnnnnnnnnnnnnnnnnnnnnnnnnnnnnnnnnnnnnnnnnnnnnnnnnnnnnnnnnnnnnnnnnnnnnnnnnnnnnnnnnnnnnnnnnnnnnnnnnnnnnnnnnnnnnnnnnnnnnnnnnnnnnnnnnnnnnnnnnnnnnnnnnnnnnnnnnnnnnnnnnnnnnnnnnnnnnnnnnnnnnnnnnnnnnnnnnnnnnnnnnnnnnnnnnnnnnnnnnnnnnnnnnnnnnnnnnnnnnnnnnnnnnnnnnnnnnnnnnnnnnnnnnnnnnnnnnnnnnnnnnnnnnnnnnnnnnnnnnnnnnnnnnnnnnnnnnnnnnnnnnnnnnnnnnnnnnnnnnnnnnnnnnnnnnnnnnnnnnnnnnnnnnnnnnnnnnnnnnnnnnnnnnnnnnnnnnnnnnnnnnnnnnnnnnnnnnnnnnnnnnnnnnnnnnnnnnnnnnnnnnnnnnnnnnnnnnnnnnnnnnnnnnnnnnnnnnnnnnnnnnnnnnnnnnnnnnnnnnnnnnnnnnnnnnnnnnnnnnnnnnnnnnnnnnnnnnnnnnnnnnnnnnnnnnnnnnnnnnnnnnnnnnnnnnnnnnnnnnnnnnnnnnnnnnnnnnnnnnnnnnnnnnnnnnnnnnnnnnnnnnnnnnnnnnnnnnnnnnnnnnnnnnnnnnnnnnnnnnnnnnnnnnnnnnnnnnnnnnnnnnnnnnnnnnnnnnnnnnnnnnnnnnnnnnnnnnnnnnnnnnnnnnnnnnnnnnnnnnnnnnnnnnnnnnnnnnnnnnnnnnnnnnnnnnnnnnnnnnnnnnnnnnnnnnnnnnnnnnnnnnnnnnnnnnnnnnnnnnnnnnnnnnnnnnnnnnnnnnnnnnnnnnnnnnnnnnnnnnnnnnnnnnnnnnnnnnnnnnnnnnnnnnnnnnnnnnnnnnnnnnnnnnnnnnnnnnnnnnnnnnnnnnnnnnnnnnnnnnnnnnnnnnnnnnnnnnnnnnnnnnnnnnnnnnnnnnnnnnnnnnnnnnnnnnnnnnnnnnnnnnnnnnnnnnnnnnnnnnnnnnnnnnnnnnnnnnnnnnnnnnnnnnnnnnnnnnnnnnnnnnnnnnnnnnnnnnnnnnnnnnnnnnnnnnnnnnnnnnnnnnnnnnnnnnnnnnnnnnnnnnnnnnnnnnnnnnnnnnnnnnnnnnnnnnnnnnnnnnnnnnnnnnnnnnnnnnnnnnnnnnnnnnnnnnnnnnnnnnnnnnnnnnnnnnnnnnnnnnnnnnnnnnnnnnnnnnnnnnnnnnnnnnnnnnnnnnnnnnnnnnnnnnnnnnnnnnnnnnnnnnnnnnnnnnnnnnnnnnnnnnnnnnnnnnnnnnnnnnnnnnnnnnnnnnnnnnnnnnnnnnnnnnnnnnnnnnnnnnnnnnnnnnnnnnnnnnnnnnnnnnnnnnnnnnnnnnnnnnnnnnnnnnnnnnnnnnnnnnnnnnnnnnnnnnnnnnnnnnnnnnnnnnnnnnnnnnnnnnnnnnnnnnnnnnnnnnnnnnnnnnnnnnnnnnnnnnnnnnnnnnnnnnnnnnnnnnnnnnnnnnnnnnnnnnnnnnnnnnnnnnnnnnnnnnnnnnnnnnnnnnnnnnnnnnnnnnnnnnnnnnnnnnnnnnnnnnnnnnnnnnnnnnnnnnnnnnnnnnnnnnnnnnnnnnnnnnnnnnnnnnnnnnnnnnnnnnnnnnnnnnnnnnnnnnnnnnnnnnnnnnnnnnnnnnnnnnnnnnnnnnnnnnnnnnnnnnnnnnnnnnnnnnnnnnnnnnnnnnnnnnnnnnnnnnnnnnnnnnnnnnnnnnnnnnnnnnnnnnnnnnnnnnnnnnnnnnnnnnnnnnnnnnnnnnnnnnnnnnnnnnnnnnnnnnnnnnnnnnnnnnnnnnnnnnnnnnnnnnnnnnnnnnnnnnnnnnnnnnnnnnnnnnnnnnnnnnnnnnnnnnnnnnnnnnnnnnnnnnnnnnnnnnnnnnnnnnnnnnnnnnnnnnnnnnnnnnnnnnnnnnnnnnnnnnnnnnnnnnnnnnnnnnnnnnnnnnnnnnnnnnnnnnnnnnnnnnnnnnnnnnnnnnnnnnnnnnnnnnnnnnnnnnnnnnnnnnnnnnnnnnnnnnnnnnnnnnnnnnnnnnnnnnnnnnnnnnnnnnnnnnnnnnnnnnnnnnnnnnnnnnnnnnnnnnnnnnnnnnnnnnnnnnnnnnnnnnnnnnnnnnnnnnnnnnnnnnnnnnnnnnnnnnnnnnnnnnnnnnnnnnnnnnnnnnnnnnnnnnnnnnnnnnnnnnnnnnnnnnnnnnnnnnnnnnnnnnnnnnnnnnnnnnnnnnnnnnnnnnnnnnnnnnnnnnnnnnnnnnnnnnnnnnnnnnnnnnnnnnnnnnnnnnnnnnnnnnnnnnnnnnnnnnnnnnnnnnnnnnnnnnnnnnnnnnnnnnnnnnnnnnnnnnnnnnnnnnnnnnnnnnnnnnnnnnnnnnnnnnnnnnnnnnnnnnnnnnnnnnnnnnnnnnnnnnnnnnnnnnnnnnnnnnnnnnnnnnnnnnnnnnnnnnnnnnnnnnnnnnnnnnnnnnnnnnnnnnnnnnnnnnnnnnnnnnnnnnnnnnnnnnnnnnnnnnnnnnnnnnnnnnnnnnnnnnnnnnnnnnnnnnnnnnnnnnnnnnnnnnnnnnnnnnnnnnnnnnnnnnnnnnnnnnnnnnnnnnnnnnnnnnnnnnnnnnnnnnnnnnnnnnnnnnnnnnnnnnnnnnnnnnnnnnnnnnnnnnnnnnnnnnnnnnnnnnnnnnnnnnnnnnnnnnnnnnnnnnnnnnnnnnnnnnnnnnnnnnnnnnnnnnnnnnnnnnnnnnnnnnnnnnnnnnnnnnnnnnnnnnnnnnnnnnnnnnnnnnnnnnnnnnnnnnnnnnnnnnnnnnnnnnnnnnnnnnnnnnnnnnnnnnnnnnnnnnnnnnnnnnnnnnnnnnnnnnnnnnnnnnnnnnnnnnnnnnnnnnnnnnnnnnnnnnnnnnnnnnnnnnnnnnnnnnnnnnnnnnnnnnnnnnnnnnnnnnnnnnnnnnnnnnnnnnnnnnnnnnnnnnnnnnnnnnnnnnnnnnnnnnnnnnnnnnnnnnnnnnnnnnnnnnnnnnnnnnnnnnnnnnnnnnnnnnnnnnnnnnnnnnnnnnnnnnnnnnnnnnnnnnnnnnnnnnnnnnnnnnnnnnnnnnnnnnnnnnnnnnnnnnnnnnnnnnnnnnnnnnnnnnnnnnnnnnnnnnnnnnnnnnnnnnnnnnnnnnnnnnnnnnnnnnnnnnnnnnnnnnnnnnnnnnnnnnnnnnnnnnnnnnnnnnnnnnnnnnnnnnnnnnnnnnnnnnnnnnnnnnnnnnnnnnnnnnnnnnnnnnnnnnnnnnnnnnnnnnnnnnnnnnnnnnnnnnnnnnnnnnnnnnnnnnnnnnnnnnnnnnnnnnnnnnnnnnnnnnnnnnnnnnnnnnnnnnnnnnnnnnnnnnnnnnnnnnnnnnnnnnnnnnnnnnnnnnnnnnnnnnnnnnnnnnnnnnnnnnnnnnnnnnnnnnnnnnnnnnnnnnnnnnnnnnnnnnnnnnnnnnnnnnnnnnnnnnnnnnnnnnnnnnnnnnnnnnnnnnnnnnnnnnnnnnnnnnnnnnnnnnnnnnnnnnnnnnnnnnnnnnnnnnnnnnnnnnnnnnnnnnnnnnnnnnnnnnnnnnnnnnnnnnnnnnnnnnnnnnnnnnnnnnnnnnnnnnnnnnnnnnnnnnnnnnnnnnnnnnnnnnnnnnnnnnnnnnnnnnnnnnnnnnnnnnnnnnnnnnnnnnnnnnnnnnnnnnnnnnnnnnnnnnnnnnnnnnnnnnnnnnnnnnnnnnnnnnnnnnnnnnnnnnnnnnnnnnnnnnnnnnnnnnnnnnnnnnnnnnnnnnnnnnnnnnnnnnnnnnnnnnnnnnnnnnnnnnnnnnnnnnnnnnnnnnnnnnnnnnnnnnnnnnnnnnnnnnnnnnnnnnnnnnnnnnnnnnnnnnnnnnnnnnnnnnnnnnnnnnnnnnnnnnnnnnnnnnnnnnnnnnnnnnnnnnnnnnnnnnnnnnnnnnnnnnnnnnnnnnnnnnnnnnnnnnnnnnnnnnnnnnnnnnnnnnnnnnnnnnnnnnnnnnnnnnnnnnnnnnnnnnnnnnnnnnnnnnnnnnnnnnnnnnnnnnnnnnnnnnnnnnnnnnnnnnnnnnnnnnnnnnnnnnnnnnnnnnnnnnnnnnnnnnnnnnnnnnnnnnnnnnnnnnnnnnnnnnnnnnnnnnnnnnnnnnnnnnnnnnnnnnnnnnnnnnnnnnnnnnnnnnnnnnnnnnnnnnnnnnnnnnnnnnnnnnnnnnnnnnnnnnnnnnnnnnnnnnnnnnnnnnnnnnnnnnnnnnnnnnnnnnnnnnnnnnnnnnnnnnnnnnnnnnnnnnnnnnnnnnnnnnnnnnnnnnnnnnnnnnnnnnnnnnnnnnnnnnnnnnnnnnnnnnnnnnnnnnnnnnnnnnnnnnnnnnnnnnnnnnnnnnnnnnnnnnnnnnnnnnnnnnnnnnnnnnnnnnnnnnnnnnnnnnnnnnnnnnnnnnnnnnnnnnnnnnnnnnnnnnnnnnnnnnnnnnnnnnnnnnnnnnnnnnnnnnnnnnnnnnnnnnnnnnnnnnnnnnnnnnnnnnnnnnnnnnnnnnnnnnnnnnnnnnnnnnnnnnnnnnnnnnnnnnnnnnnnnnnnnnnnnnnnnnnnnnnnnnnnnnnnnnnnnnnnnnnnnnnnnnnnnnnnnnnnnnnnnnnnnnnnnnnnnnnnnnnnnnnnnnnnnnnnnnnnnnnnnnnnnnnnnnnnnnnnnnnnnnnnnnnnnnnnnnnnnnnnnnnnnnnnnnnnnnnnnnnnnnnnnnnnnnnnnnnnnnnnnnnnnnnnnnnnnnnnnnnnnnnnnnnnnnnnnnnnnnnnnnnnnnnnnnnnnnnnnnnnnnnnnnnnnnnnnnnnnnnnnnnnnnnnnnnnnnnnnnnnnnnnnnnnnnnnnnnnnnnnnnnnnnnnnnnnnnnnnnnnnnnnnnnnnnnnnnnnnnnnnnnnnnnnnnnnnnnnnnnnnnnnnnnnnnnnnnnnnnnnnnnnnnnnnnnnnnnnnnnnnnnnnnnnnnnnnnnnnnnnnnnnnnnnnnnnnnnnnnnnnnnnnnnnnnnnnnnnnnnnnnnnnnnnnnnnnnnnnnnnnnnnnnnnnnnnnnnnnnnnnnnnnnnnnnnnnnnnnnnnnnnnnnnnnnnnnnnnnnnnnnnnnnnnnnnnnnnnnnnnnnnnnnnnnnnnnnnnnnnnnnnnnnnnnnnnnnnnnnnnnnnnnnnnnnnnnnnnnnnnnnnnnnnnnnnnnnnnnnnnnnnnnnnnnnnnnnnnnnnnnnnnnnnnnnnnnnnnnnnnnnnnnnnnnnnnnnnnnnnnnnnnnnnnnnnnnnnnnnnnnnnnnnnnnnnnnnnnnnnnnnnnnnnnnnnnnnnnnnnnnnnnnnnnnnnnnnnnnnnnnnnnnnnnnnnnnnnnnnnnnnnnnnnnnnnnnnnnnnnnnnnnnnnnnnnnnnnnnnnnnnnnnnnnnnnnnnnnnnnnnnnnnnnnnnnnnnnnnnnnnnnnnnnnnnnnnnnnnnnnnnnnnnnnnnnnnnnnnnnnnnnnnnnnnnnnnnnnnnnnnnnnnnnnnnnnnnnnnnnnnnnnnnnnnnnnnnnnnnnnnnnnnnnnnnnnnnnnnnnnnnnnnnnnnnnnnnnnnnnnnnnnnnnnnnnnnnnnnnnnnnnnnnnnnnnnnnnnnnnnnnnnnnnnnnnnnnnnnnnnnnnnnnnnnnnnnnnnnnnnnnnnnnnnnnnnnnnnnnnnnnnnnnnnnnnnnnnnnnnnnnnnnnnnnnnnnnnnnnnnnnnnnnnnnnnnnnnnnnnnnnnnnnnnnnnnnnnnnnnnnnnnnnnnnnnnnnnnnnnnnnnnnnnnnnnnnnnnnnnnnnnnnnnnnnnnnnnnnnnnnnnnnnnnnnnnnnnnnnnnnnnnnnnnnnnnnnnnnnnnnnnnnnnnnnnnnnnnnnnnnnnnnnnnnnnnnnnnnnnnnnnnnnnnnnnnnnnnnnnnnnnnnnnnnnnnnnnnnnnnnnnnnnnnnnnnnnnnnnnnnnnnnnnnnnnnnnnnnnnnnnnnnnnnnnnnnnnnnnnnnnnnnnnnnnnnnnnnnnnnnnnnnnnnnnnnnnnnnnnnnnnnnnnnnnnnnnnnnnnnnnnnnnnnnnnnnnnnnnnnnnnnnnnnnnnnnnnnnnnnnnnnnnnnnnnnnnnnnnnnnnnnnnnnnnnnnnnnnnnnnnnnnnnnnnnnnnnnnnnnnnnnnnnnnnnnnnnnnnnnnnnnnnnnnnnnnnnnnnnnnnnnnnnnnnnnnnnnnnnnnnnnnnnnnnnnnnnnnnnnnnnnnnnnnnnnnnnnnnnnnnnnnnnnnnnnnnnnnnnnnnnnnnnnnnnnnnnnnnnnnnnnnnnnnnnnnnnnnnnnnnnnnnnnnnnnnnnnnnnnnnnnnnnnnnnnnnnnnnnnnnnnnnnnnnnnnnnnnnnnnnnnnnnnnnnnnnnnnnnnnnnnnnnnnnnnnnnnnnnnnnnnnnnnnnnnnnnnnnnnnnnnnnnnnnnnnnnnnnnnnnnnnnnnnnnnnnnnnnnnnnnnnnnnnnnnnnnnnnnnnnnnnnnnnnnnnnnnnnnnnnnnnnnnnnnnnnnnnnnnnnnnnnnnnnnnnnnnnnnnnnnnnnnnnnnnnnnnnnnnnnnnnnnnnnnnnnnnnnnnnnnnnnnnnnnnnnnnnnnnnnnnnnnnnnnnnnnnnnnnnnnnnnnnnnnnnnnnnnnnnnnnnnnnnnnnnnnnnnnnnnnnnnnnnnnnnnnnnnnnnnnnnnnnnnnnnnnnnnnnnnnnnnnnnnnnnnnnnnnnnnnnnnnnnnnnnnnnnnnnnnnnnnnnnnnnnnnnnnnnnnnnnnnnnnnnnnnnnnnnnnnnnnnnnnnnnnnnnnnnnnnnnnnnnnnnnnnnnnnnnnnnnnnnnnnnnnnnnnnnnnnnnnnnnnnnnnnnnnnnnnnnnnnnnnnnnnnnnnnnnnnnnnnnnnnnnnnnnnnnnnnnnnnnnnnnnnnnnnnnnnnnnnnnnnnnnnnnnnnnnnnnnnnnnnnnnnnnnnnnnnnnnnnnnnnnnnnnnnnnnnnnnnnnnnnnnnnnnnnnnnnnnnnnnnnnnnnnnnnnnnnnnnnnnnnnnnnnnnnnnnnnnnnnnnnnnnnnnnnnnnnnnnnnnnnnnnnnnnnnnnnnnnnnnnnnnnnnnnnnnnnnnnnnnnnnnnnnnnnnnnnnnnnnnnnnnnnnnnnnnnnnnnnnnnnnnnnnnnnnnnnnnnnnnnnnnnnnnnnnnnnnnnnnnnnnnnnnnnnnnnnnnnnnnnnnnnnnnnnnnnnnnnnnnnnnnnnnnnnnnnnnnnnnnnnnnnnnnnnnnnnnnnnnnnnnnnnnnnnnnnnnnnnnnnnnnnnnnnnnnnnnnnnnnnnnnnnnnnnnnnnnnnnnnnnnnnnnnnnnnnnnnnnnnnnnnnnnnnnnnnnnnnnnnnnnnnnnnnnnnnnnnnnnnnnnnnnnnnnnnnnnnnnnnnnnnnnnnnnnnnnnnnnnnnnnnnnnnnnnnnnnnnnnnnnnnnnnnnnnnnnnnnnnnnnnnnnnnnnnnnnnnnnnnnnnnnnnnnnnnnnnnnnnnnnnnnnnnnnnnnnnnnnnnnnnnnnnnnnnnnnnnnnnnnnnnnnnnnnnnnnnnnnnnnnnnnnnnnnnnnnnnnnnnnnnnnnnnnnnnnnnnnnnnnnnnnnnnnnnnnnnnnnnnnnnnnnnnnnnnnnnnnnnnnnnnnnnnnnnnnnnnnnnnnnnnnnnnnnnnnnnnnnnnnnnnnnnnnnnnnnnnnnnnnnnnnnnnnnnnnnnnnnnnnnnnnnnnnnnnnnnnnnnnnnnnnnnnnnnnnnnnnnnnnnnnnnnnnnnnnnnnnnnnnnnnnnnnnnnnnnnnnnnnnnnnnnnnnnnnnnnnnnnnnnnnnnnnnnnnnnnnnnnnnnnnnnnnnnnnnnnnnnnnnnnnnnnnnnnnnnnnnnnnnnnnnnnnnnnnnnnnnnnnnnnnnnnnnnnnnnnnnnnnnnnnnnnnnnnnnnnnnnnnnnnnnnnnnnnnnnnnnnnnnnnnnnnnnnnnnnnnnnnnnnnnnnnnnnnnnnnnnnnnnnnnnnnnnnnnnnnnnnnnnnnnnnnnnnnnnnnnnnnnnnnnnnnnnnnnnnnnnnnnnnnnnnnnnnnnnnnnnnnnnnnnnnnnnnnnnnnnnnnnnnnnnnnnnnnnnnnnnnnnnnnnnnnnnnnnnnnnnnnnnnnnnnnnnnnnnnnnnnnnnnnnnnnnnnnnnnnnnnnnnnnnnnnnnnnnnnnnnnnnnnnnnnnnnnnnnnnnnnnnnnnnnnnnnnnnnnnnnnnnnnnnnnnnnnnnnnnnnnnnnnnnnnnnnnnnnnnnnnnnnnnnnnnnnnnnnnnnnnnnnnnnnnnnnnnnnnnnnnnnnnnnnnnnnnnnnnnnnnnnnnnnnnnnnnnnnnnnnnnnnnnnnnnnnnnnnnnnnnnnnnnnnnnnnnnnnnnnnnnnnnnnnnnnnnnnnnnnnnnnnnnnnnnnnnnnnnnnnnnnnnnnnnnnnnnnnnnnnnnnnnnnnnnnnnnnnnnnnnnnnnnnnnnnnnnnnnnnnnnnnnnnnnnnnnnnnnnnnnnnnnnnnnnnnnnnnnnnnnnnnnnnnnnnnnnnnnnnnnnnnnnnnnnnnnnnnnnnnnnnnnnnnnnnnnnnnnnnnnnnnnnnnnnnnnnnnnnnnnnnnnnnnnnnnnnnnnnnnnnnnnnnnnnnnnnnnnnnnnnnnnnnnnnnnnnnnnnnnnnnnnnnnnnnnnnnnnnnnnnnnnnnnnnnnnnnnnnnnnnnnnnnnnnnnnnnnnnnnnnnnnnnnnnnnnnnnnnnnnnnnnnnnnnnnnnnnnnnnnnnnnnnnnnnnnnnnnnnnnnnnnnnnnnnnnnnnnnnnnnnnnnnnnnnnnnnnnnnnnnnnnnnnnnnnnnnnnnnnnnnnnnnnnnnnnnnnnnnnnnnnnnnnnnnnnnnnnnnnnnnnnnnnnnnnnnnnnnnnnnnnnnnnnnnnnnnnnnnnnnnnnnnnnnnnnnnnnnnnnnnnnnnnnnnnnnnnnnnnnnnnnnnnnnnnnnnnnnnnnnnnnnnnnnnnnnnnnnnnnnnnnnnnnnnnnnnnnnnnnnnnnnnnnnnnnnnnnnnnnnnnnnnnnnnnnnnnnnnnnnnnnnnnnnnnnnnnnnnnnnnnnnnnnnnnnnnnnnnnnnnnnnnnnnnnnnnnnnnnnnnnnnnnnnnnnnnnnnnnnnnnnnnnnnnnnnnnnnnnnnnnnnnnnnnnnnnnnnnnnnnnnnnnnnnnnnnnnnnnnnnnnnnnnnnnnnnnnnnnnnnnnnnnnnnnnnnnnnnnnnnnnnnnnnnnnnnnnnnnnnnnnnnnnnnnnnnnnnnnnnnnnnnnnnnnnnnnnnnnnnnnnnnnnnnnnnnnnnnnnnnnnnnnnnnnnnnnnnnnnnnnnnnnnnnnnnnnnnnnnnnnnnnnnnnnnnnnnnnnnnnnnnnnnnnnnnnnnnnnnnnnnnnnnnnnnnnnnnnnnnnnnnnnnnnnnnnnnnnnnnnnnnnnnnnnnnnnnnnnnnnnnnnnnnnnnnnnnnnnnnnnnnnnnnnnnnnnnnnnnnnnnnnnnnnnnnnnnnnnnnnnnnnnnnnnnnnnnnnnnnnnnnnnnnnnnnnnnnnnnnnnnnnnnnnnnnnnnnnnnnnnnnnnnnnnnnnnnnnnnnnnnnnnnnnnnnnnnnnnnnnnnnnnnnnnnnnnnnnnnnnnnnnnnnnnnnnnnnnnnnnnnnnnnnnnnnnnnnnnnnnnnnnnnnnnnnnnnnnnnnnnnnnnnnnnnnnnnnnnnnnnnnnnnnnnnnnnnnnnnnnnnnnnnnnnnnnnnnnnnnnnnnnnnnnnnnnnnnnnnnnnnnnnnnnnnnnnnnnnnnnnnnnnnnnnnnnnnnnnnnnnnnnnnnnnnnnnnnnnnnnnnnnnnnnnnnnnnnnnnnnnnnnnnnnnnnnnnnnnnnnnnnnnnnnnnnnnnnnnnnnnnnnnnnnnnnnnnnnnnnnnnnnnnnnnnnnnnnnnnnnnnnnnnnnnnnnnnnnnnnnnnnnnnnnnnnnnnnnnnnnnnnnnnnnnnnnnnnnnnnnnnnnnnnnnnnnnnnnnnnnnnnnnnnnnnnnnnnnnnnnnnnnnnnnnnnnnnnnnnnnnnnnnnnnnnnnnnnnnnnnnnnnnnnnnnnnnnnnnnnnnnnnnnnnnnnnnnnnnnnnnnnnnnnnnnnnnnnnnnnnnnnnnnnnnnnnnnnnnnnnnnnnnnnnnnnnnnnnnnnnnnnnnnnnnnnnnnnnnnnnnnnnnnnnnnnnnnnnnnnnnnnnnnnnnnnnnnnnnnnnnnnnnnnnnnnnnnnnnnnnnnnnnnnnnnnnnnnnnnnnnnnnnnnnnnnnnnnnnnnnnnnnnnnnnnnnnnnnnnnnnnnnnnnnnnnnnnnnnnnnnnnnnnnnnnnnnnnnnnnnnnnnnnnnnnnnnnnnnnnnnnnnnnnnnnnnnnnnnnnnnnnnnnnnnnnnnnnnnnnnnnnnnnnnnnnnnnnnnnnnnnnnnnnnnnnnnnnnnnnnnnnnnnnnnnnnnnnnnnnnnnnnnnnnnnnnnnnnnnnnnnnnnnnnnnnnnnnnnnnnnnnnnnnnnnnnnnnnnnnnnnnnnnnnnnnnnnnnnnnnnnnnnnnnnnnnnnnnnnnnnnnnnnnnnnnnnnnnnnnnnnnnnnnnnnnnnnnnnnnnnnnnnnnnnnnnnnnnnnnnnnnnnnnnnnnnnnnnnnnnnnnnnnnnnnnnnnnnnnnnnnnnnnnnnnnnnnnnnnnnnnnnnnnnnnnnnnnnnnnnnnnnnnnnnnnnnnnnnnnnnnnnnnnnnnnntccttggcccgcgagtccgtgaagctcggcgtcgtctcgcggttcacgacatgccacgtcgacttggtcaggaacacgccacgcatgtagcggttccacgtcgcgtagttgtccccgttgaacttgtcaatggagaccttggtcgaggcgtcttgggcagaggacatggtgcttgggctcataacctgatggaaggtatggatcttggacacgaagctcggacgaagcggagggagggacgtcgcagacggcgggaccggagcgaaggcacttgaggggtagaatgaagattcgaaagtgattgaattgttggagcttacaccctactgttatagacacgcgaccctgcgtcctatcacctagtgcatctaatcaaccatcactcaccggtgttcatccaatcatcctactcgtctaatcatcggtggcgtaaacagcttaccgtaatcaccataatcaacgtgggttcggattggaccggttcgggttaaccggttaatgggtacaactggtacacagtacccaagaccagcaaccctcaataattgcatctgccagtctcctgattgacaaggagttgtctaacagagacgcaaatgttgaaagccttagccgttttccgaatgaaatcaacagtagctcccgagttgaacattgttgtcaagactgatgtgacgacgcctcgccaagcgaccgtgtgacgcgaacgcgtcatcagtgaggttggcgtgaccttcactgtgttgtaccgcaatcattcaggtgattacgggacgatgattacgccacggtgattacgccatgattgtgggtacaggattgtgggtacaagatgggcatcgacgtggcgttctctgattggataaggtaactgtgtatccagtagagaatccagtagggtgtatccagtaagaggtatccagtagcaggcttagaggtagcacgcggttgcgaactaaggacctgaatcgaatcactttgcattttgccaactactgctcaagtgttcttccttttggttatgagcccaagccccgtcttccctgaccaagaccccgactacgccttcgccatggacgccgccccgaccgcgaccgcccgcatcaacaagttcaacggaaccaacttccacacatggaagttcaagatgcagatggtgctggaggagcgcgaactgtgggaagtgacgagtggggaagtgaagctcgagcagtgcacgaccgcggcggaccaagcgacgtttcgcaagaagtcgcgcaaggcgctggcgatcgtctgtctcgcgatggaggactcgcagctgccgctggtgcggtcggcgaaggacgcgcatgatgcatggtcaagactcgagggacacttcgagaagaagagcctggcgaacaagctctttcttcgtcgacggttcttcacgacaacgatggacgaaggtgatgatgtgctggagcacattaacaagctcaagacgctggcggaacagctcgacgcggtcggcgctccggtcagcgaggacgacttggtgatcacgcttcttgccagtctgagcgagtcgtaccagttcctcatcacggcgttggaatcgcgttccgacacgctgacgtgggagctcgtgacgtctcggctcctgcacgaggacatgaagcgcaaggaacaaggtggcggtgctgacggaaccgcgcacgctcaaggtcaagcgttcatgacaagcgacaacgggaagcgcaagggacggcaggcgcaagcgcagaggacgagcgcctgtcactactgcggcgagcacggacattggatcgccaagtgtccggtgcggatccgcgagaacggggagcggcagaggccgcaacgagcgaacgtcgcgcaggtcgaagatgactctggcgacttcctcttctcggttggtggcgacacgggtgcctccaagctgagcggcatgtggctggttgactcaggtgcgacgcagcacatgacgtactcgaaggagtacatgaagaactacaagaagatctctccggtggacgtgcatctggcggacgacggcgtggttcaggcggtggggagcggcgacatcgtgatgtcgatgcagacaccgcgcggcatgaagaagggtgtgctcacgggtgtgtggcacatcccgaagctgtcgcgcaacctgttctccgtcggccgcttcaccaaggacgtcgggccagtgaccttcgagagcgacgggtgcttcgcggaaacgaagggtctcaagtggaagctcggcgctcgcgaaggcaaaggactgttcaagctctgcatgacgccgaggacgcctgctgacgaggccaatgcggcaagctcgaagaatcgccaaggggacaccacgtcgtacctctggcaccttcgacttggtcacatcggccatggtggtctcgacgccatcgtcaagaagggctacggcactggcatcccaatgacgtcggtgaagcagtgggaggtgtgcgacgggtgcgcactcggcaagcaaacgcgagtaagcttcatgaagtcgtcgccgaaccgtgcgaagcaagtgctggaggtggtccacagcgatgtgtgcggtccgatgcagacggcgacgttcggaggcaagcgctacttcgtcacgttcatcgacgacaagtcgcacttctgcgtggtgtacctgctacggaacaagtcggaggtggctgccaagttcgctgcgttcgtcgcgttggctgagacgcagaccggcaagcgagtgaaggtgcttcggagcgacaacggcggcgagtacacttcgggtgcgatggccaagttgtgtgcggatcgcggcatcgagcagaagttcacgccaccatacacgcctcagctcaacggagtggccgagcgaatgaatcggacgctggtggagtgtgcgcgctgcatgctggagcacgccgggttgtcgaaggagtactggggagaagcggtgatgacggccacgttcctccgcaaccggtgtccgacgcgcgccatcagtcacgacaagtcgccgcaccacgtttggaccggcaagaagcctttgctggccaacctcaaggtgttcgggtgccacgcgtacgtgcacgtgccgaaggagaagcggtcgaagttcgacgctcggtcggtgcgctgtcgtttcctcgggtactcggagcacgagaaggcgtatcggtttgaggagatcgagagcggtcgcgtgttggtgagccgcgacgcgcagttcatggaggatgtcttcgacggtgggagacgcgactacgcttcgaaggaggtgttggtgggtcttccgacagatgatgatgaagacaccacggatgaagagactcagtccggatcagacgagaacagagaagaagctgcgcggaatcaagactttgtacccggcagcaagcgacacccgcgcacgcagtcgctcgaggaagccgtggaggttccgagtgccaagcggtatgcggtgccgagacgacagcagccgctggacgagatgtctgccgcagcacaagagaaggaagacttcgaggctgcgtacgtcgtggattcagtgggagagatgccgacaacgttcaagtcggcgatggaatccagcgacgcagacaagtggaaagaggcgtgcgactcggaggtggagtcgctccgcaagaacgagacgtggaccctggtgccactgccgaagggacgcaaggcgatcggctgcagatgggtgttccgcgtgaaggagaaccagtctggagagatcgagcggttcaaggcgcgactggtggcgaaggggttctcgcagaagtacggcatcgactacgacgagacgttcgcgccggtggccaagttcacgtcgattcgggtgttgctgagtctggcggccaagtacaagctcacagtgcaccagatggatgtgaagaccgcgttcctcaacggcttgttggacgaggacatctacatggcgcagccggacggatatgtggacggagatcgacccgactacgtgtgccggctcaagcgttcgctgtacggcctgaagcggtcgccgcggatgtggaacaagacgatcgacgagttcatgttgaagctggggttcaagaagtgcgagtccgaccactgcatctacttgaagcgggacaatcacgacatgatgttcgtggcactgtacgtggacgatctggtcctcgccagcagcagcgacgggatgctgaaggacacgaagcaggcgctgagtgaccggttcgagatgaccgacatgggccagctcaagtactttctcagtatggagatcgagcaagatgtggcgactgggatggtgtcggtgcggcagaccaagttcgcgaaggacattctcgagaagttcaagatggatgagagcaaccctgtgaagacaccgcaggatccgggtctgaagctgaccaaggccatgtgcgagggaggctgcaaacacgacgagaccatggcgaatgttccgtaccggaacgccgtgggctgcctcatgtatctcatggtggggactcgtccggacctcgcagcggcagtgggagtgctgagccagttcgcagcggacccatgtccgacacactggcagggtcttccgctacatccgaggcacgaagacgcacggcctcgtgtttcaagcgagcagcgaggacggactgcaaggctactcggacgcggactgggccggcgacatcgagtctcgacggagtacgagcggctacgcgttcatgatgaacggcggatgcatcagctggcgaagcaagaagcagcgcacggtggcgctctcgtcgacggaagccgagtacatggcgctgtcggaggccacgcaggaggcggtgtggctcaaggtgtttctgtgcgagctgggcgagatggcgagcgatgaagcggtgaagatctacgaggacaaccaaggctccatcgcgtggccaagaacccggagttccacaagcgcaccaagcacatcgacattcgctaccacttcgtgcgcgagaaggtggaagacggtcaagtggtgttgcagtatgtttcgacactcgacatgctggcggacatcatgacgaagccgatcgcggcgccgcagttcgacgcgctcaggacgaagctgggcatcgtggtcgctgacgagtcgagtgggagtgttgtcaagactgatgtgacgacgcctcgccaagcgaccgtgtgacgcgaacgcgtcatcagtgaagtcggcgtgaccttcactgtgtggtaccgcaatcattcaggtgattacgggacggtgattacgccaagattgtgggtacaagatgggcatcgacgtggcgttctctgattggataaggtaactgtgtatccagtagagaatccagtagggtgtatccagtaagaggtattcagtagcaggcttagaggtagcacgcggttgcgaactaaggacctgaatcgaatcactttgcattttgccaactactgctcaagtgttcttccttttatgggtacaactggtacacagtacccaagaccagcaaccctcaatacaggcacgccagaggtgacacgtgtacgttcatatggaagaaaccgcagcggtagcacattggctttnnnnnnnnnnnnnnnnnnnnnnnnnnnnnnnnnnnnnnnnnnnnnnnnnnnnnnnnnnnnnnnnnnnnnnnnnnnnnnnnnnnnnnnnnnnnnnnnnnnnnnnnnnnnnnnnnnnnnnnnnnnnnnnnnnnnnnnnnnnnnnnnnnnnnnnnnnnnnnnnnnnnnnnnnnnnnnnnnnnnnnnnnnnnnnnnnnnnnnnnnnnnnnnnnnnnnnnnnnnnnnnnnnnnnnnnnnnnnnnnnnnnnnnnnnnnnnnnnnnnnnnnnnnnnnnnnnnnnnnnnnncgcgactgataaccacctgccccgcctcgatgtcataaactcaatacgccttggacacttcttcgtagccgaggaacagcccggcgcgagccttggggtcccacttgcgccgtctttccttcggcgtcaggatgtacgtctggcatccgaacacacgcatgtgcttcacactcggcttggacttgtaaacgatcggagtcttgtgttcgatcttgggtgatggcagacgattcttcacgtagatggctgtcatggccgcctcagcccagaagctcttgtccagcttggcgtgatgcagcatgctgcggccaatcgtgacgatggtccggatggcgcgttctgccgtgccgttggtctggtgcgcgtacggaaccgtggtttgctgctcgatgtcttcggcttcgtagaaggccttgagcgagttggtcgcgaactcacgggctccgtcgtgccgcacaaacttgaccttcttgccgaactgcgtctgcaccttcgtgacgtacatcttgatgcagtcctcgctctccgacttggcacgcaggcagaaccccttcatgcatccgctggcttcgtccacgatcagcagcagatacttgctgccacccagtgactcttcttccatggggccgcacacgtcgaagtggagcagctcgaatgtgtcgtagtgacgcttgtcacagttgcttgggaacggcttctggaccattttcccttgctggcagccgcgacacacgcttggtccactcgacttggaaggtgccttcgcgtccttgatcatgttgttgtcgaccatcttgcgaagcacctccaccggagcgtgacccatacgcgcgtgtaagtcgaccgtcttcccactggtcgccgcattcgccgatcgctgaggcgtctggagccagtagagtccatccacgaggtttgccgtcgccaccacttgcttggagcccttgtgcgcaatctgcatcttggtgctgtcgaacacgacttggaacagaccactcttgttgatctgtggcaccgaaagcagattcttgctcatgcttgggacgtacagcgcgttcttgatctcgatgtcgcgctcgtcgccgttgggcagaaccactcgttccacgatggtccccacacccgtggtggccgccttgttgccgtcggccaccgaaagttcgccttcattccgctcaatcaaatgagcgaacttggccttgtcgttgcagatgtggtgggttgcgccgctgtcgaccgcccacaacccggacacattcttgcccgtcgaaatgccacactccagtgagaccgcgaacgccactcgatcatagccgtagtcgtagttgtagctggcgtcgtcgttcctccactgggcattgttggccccgcgtccacggccattgccattgccgccgcgtcttgggccccgattctcgtccttctgcttggtccagcacttgtcaatcgtgtgccccaatttcccgcagtacgtacactggcgagactctcggtcggtgttgaacgccttggccgcattctccgtcttcaccgtcgccgtcttctcgccttgtctcttgatatgctcattcgtcagcaccttcacgacgtcttgcgatcgtagttcagcgctgctcatctccaagttcagcacgacgttctcgtagctcttggggaggctgcgcaacaggcagatcgccacgtcctcatcctccatcttggcgccgatgctgctgagcttggcgctgatgttgaggacctcgttgcaatgatgcaagacgttgccgccttccgacatctccatgctgaagagttggcgcttcaggtagatgcgtccagccttctgcgaaccaccgtacagcgtcttcaggcgcgtccacgcaacccacgcttcctcgcagtcgtcgaccacatggtggtagtccgcgtccatgtggagcaacatcagtccgaacgcgatgttgctcgacttgacgtagtcgtccttggcccgcgagtccgtgaagctcggcgtcgtctcgcggttcacgacatgccacgtcgacttggtcaggaacacgccacgcatgtagcggttccacgtcgcgtagttgtccccgttgaacttgtcaatggagaccttggtcgaggcgtcttgggcagaggacatggtgcttgggctcataacctgatggaaggtatggatcttggacacgaagctcggacgaagcggagggagggacgtcgcagacggcgggaccggagcgaaggcacttgaggggtagaatgaagattcgaaagtgattgaattgttggagcttacaccctactgttatagacacgcgaccctgcgtccttccacctagtgcatctaatcaaccatcactcaccggtgttcatccaatcatcctactcgtctaatcatcggtggcgtaaacaacttaccgtaatcaccataatcaacgtgggttcggattggaccggttcgggttaaccggttaaagggtacaactggtacacagtacccaagaccagcaaccctcaatacgccccctcaatgcgaagtcccacgaatgccgagagccaccgtcagatccgtgtggcgtggtcccgtaagcgccttcgtcatgatgtccgctagcatcacagaagtctcgtagtactggagcttgacttcgccgcgcttgacttcatcgcggatgtggtggtacttgatgtcgatgtgcttggcgcgaccgtggttcactgggttcttcgtcatcttgatgcacgactggttgtcttcgcggatcatgagttcgggtccagtctcattagcggccgccagaatctcgcatagcaggcgatgaatccacttgccttcttggatagccagactgagcgcgatgtactccgcttcattgcttcttgcttccccagctcacaggcgcactcatgagcatgaacgtgtagcctgaagtggacttgcggtcggcgaggtcgccggcccagtccgcatccgagtagccacgaaagtcgatcttgtcgcccggcttgaagcagatcccatgcgtcttggtgccttgcaggtagcgaaagatacgcttgaccacaacccagtgttcctcttgggggttctccatgaagcgcgatacatagccaacggcgtacgcgatgtctgggcgcgtggcggtcattaggtgcatcagagcaccaacagcttcgcgaaacggagcgttcaccttggtcgccgcgtcgcttggaaccagtcgagtgctcatgtccaccgaactcaccacggccttgcactcgtccatggcgaagcgcttcaggatgtcgtccacgtatcgccgctggcacatggtcacgctgccgtccgggccgtccaccaactcgatcccaagaacaaacgcgcacttgccgctgtcggtcatctcgaagcgcgtcttcaggtcggtcttcgtgcgtgcgatcagctcgggcgaactcccggtaatcagtacgtcatccacgtacaccagtacaagcacgcagtgaccgtccaccaccttaatgtagaggcacggatcgaaggccaacacttggaagccgatggagcacacgaactcgtcgaaggtctcgttccacactcgcgaagcttgcttgagaccgtagatggccttcaccagttccaggcagtcgaagtcaccatccagttcgacgccttccggaaccacgcagaagaccacctccttcattatcccgtacaggaatgctgtcaccacgtcgagttggtcgaggggccagccaaaatacttagcaatcgcgatcaccatgcgcagcgtcacatacttgaccacgggcgagaacgtctcggtgtagtcaatgccgtacttctgcttgaagcccttggccacgaggcgcgccttgtacttctcgatcgagccgtccgctttgcgcttgatcttaaacacccacttggtatcgatggcgcgttgtccgttaggcaacttggcagctcgaaacacaccacgcagtcgcatcgacttgagctccgcgcggatcgctttgcgccagtgcacttgatcaggaccgttcacagcctcttggaacgtcgtcggctccgatagatcggctgctgcttccacagcgttggcactggcacgccaaaacactggaggcgtcgagtcgtcgtcttcatcttggtccccagacttttcttcctcgtcggggtcggctcggcgcgaggaggatacgtccggcgcacttgcttcttctaagccagctcggtggcgaacggggcgcgatgttctggcagtgttgtcgtcgccactcggtcggtacttgcgcttccccgcctgcttgaagctcgtttggcgcggtccatcgttgtcgtccaggtccagcgcgtccaagtccaacacagcatcatcgacgtcttcatccgaagtatgcgtcgaaagtccaaaggtcgactcatcgaagttgacatcgcgactgataaccacctgccccgcctcgatgtcataaactcgatacgccttggacacttcttcgtagccgaggaacagcccggcgcgagccttggggtcccacttgcgccgtctttccttcggcgtcaggatgtacgtctggcatccgaacacacgcatgtgcttcacactcggcttggacttgtaaacgatctcgaacggagtcttgtgttcgatcttgggtgatggcagacgattcttcacgtagatggctgtcatggccgcctcagcccagaagctcttgtccagcttggcgtgatgcagcatgctgcggccaatcgtgacgatggtccggatggcgcgttctgccgtgccgttggtctggtgcgcgtacggaaccgtggtttgctgctcgatgccttcgacttcgtagaaggccttgagcgagttggtcgcgaactcacgggctccgtcgtgccgcacaaacttgaccttcttgccgaactgcgtctgcaccttcgtgacgtacatcttgatgcagtcctcgctctccgacttggcacgcagaaccccttcatgcatccgctggcttcgtccacgatcagcagcagatacttgctgccacccagtgactcttcttccatggggccgcacacgtcgaagtggagcagctcgaacgtgtcgtagtgacgcttgtcacggttgcttgggaacggcttctggaccattttccccttgctggcagccgcgacacacgcttggtccactcgacttggaaggtgccttcgcgtccttgatcatgttgttgtcgaccatcttgcgaagcacctccaccggagcgtgacccatacgcgcgtgtaagtcgaccgtcttcccactggtcgccgcattcgccgatcgctgaggcgtctggagccagtagagtccatccacgaggtttgccgtcgccaccacttgcttggagcccttgtgcgcaatctgcatcttggtgctgtcgaacacgacttggaacagaccactcttgttgatctgtggcaccgaaagcagattcttgctcatgcttgggacgtacagcgcgttcttgatctcgatgtcgcgctcgtcgccgttgggcagaaccactcgttccacgatggtccccacacccatgatggccgccttgttgccgtcggccaccgaaagttcgccttcattccgctcaatcaaatgtgcgaacttggccttgtcgttgcagatgtggtgcgttgcgccgctgtcgaccgcccacaacccggacacattcttgcccgtcgaaatgccacactccagtgagaccgcgaacgccactcgatcatagccgtagtcgtagttgtagctggcgtcgtcgttcctccactgggcattgttggccccgcgtccacggccattgccattgccgccgcgtcttgggccccgattctcgtccttctgcttggtccagcacttgtcaatcgtgtgccccaatttcccgcagttcgtacactggcgagactctcggtcggtgttgaacgccttggccgcattctccgtcttcaccgtcgccgtcttctcgccttgtctcttgatgtgctcattcgtcagcaccttcacgacgtcttgcgatcgtagttcagcgctgctcatctccaagttcagcacgacgttctcgtagctcttggggaggctgcgcaacaggcagatcgccacgtcctcatcctccatcttggcgccgatgctgctgagcttggcgctgatgttgaggacctcgttgcaatgatgcaagacgttgccgccttccgacatctccatgctgaagagttggcgcttcaggtagatgcgtccagccttctgcgaaccaccgtacagcgtcttcaggcgcgtccacgcaacccacgcttcctcgcagtcgtcgaccacatggtggtagtccgcgtccatgtggagcaacatcagtccgaacgcgatgttgctcgacttgacgtagtcgtccttggcccgcgagtccgtgaagctcggcgtcgtctcgtggttcacgacatgccacgtcgacttggtcaggaacacgccacgcatgtagcggttccacgtcgcgtagttgtccccgttgaacttgtcaatggagaccttggtcgaggcgtcttgggcagaggacatggtgcttgggctcataacctgatggaaggtatggatcttggacacgaagctcggacgaagcggagggagggacgtcgcagacggcgggaccggagcgaaggcacttgaggggtagaatgaagattcgaaagtgattgaattgttggagcttacaccctactgttatagacacgcgaccctgcgtcctatcacctagtgcatctaatcaaccatcactcaccggtgttcatccaatcatcctactcgtctaatcatcggtggcgtaaacaacttaccgtaatcaccataatcaacgtgggttcggattggaccggttcgggttaaccggttaatgggtacaactggtacacagtacccaagaccagcaaccctcaatacgccccctcaatgcgaagtcccacgaatgccgagagccaccgtcagatccgtgtggcgtggtcccgcaagcgccttcgtcatgatgtccgctagcatcacagaagtctcgcagtactggagcttgacttcgccgcgcttgacttcatcgcggatgtggtggtacttgatgtcgatgtgcttggcgcgaccgtggttcactgggttcttcgtcatcttgatgcacgactggttgtcttcgcggatcatgagttcgggtccagtctcattagcggccgccagaatctcgcatagcaggcgatgaatccacttgccttcttggatagccagactgagcgcgatgtactccgcttcattgcttcttgcttccccagctcacaggcgcactcatgagcatgaacgtgtagcctgaagtggacttgcggtcggcgaggtcgccggcccagtccgcgtccgagtagccacgaaagtcgatcttgtcgcccggcttgaagcagatcccatgcgtcttggtgccttgcaggtagcgaaagatacgcttgaccgcaacccagtgttcctctcgggggttctccatgaagcgcgatacatagccaacggcgtacgcgatgtctgggcgcgtggcggtcatcaggtgcatcagagcaccaacagcttcgcgaaacggagcgttcaccttggtcgccgcgtcgcttggaaccagtcgagtgctcatgtccaccggactcaccacggccttgcactcgtccatggcgaagcgcttcaggatgtcgtccacgtatcgccgctggcacatggtcacgctgccgtccgggccgtccaccaactcgatcccaagaacaaacgcgcacttgccgctgtcggtcatctcgaagcgcgtcttcaggtcggtcttcgtgcgtgcgatcagctcgggcgaactcccggtaatcagtacgtcatccacgtacaccagtacaagcacgcagtgaccgtccaccaccttgatgtagaggcacggatcgaaggccgacacttggaagccgatggagcacacgaactcgtcgaaggtctcgttccacactcgtgaagcttgcttgagaccgtagatggccttcaccagttccaggcagtcgaagtcaccatccagttcgacgccttccggaaccacgcagaagaccacctccttcattatcccgtacaggaatgctgtcaccacgtcgagttggtcgaggggccagccaaaatacttagcaatcgcgatcaccatgcgcagcgtcacatacttgaccacgggcgagaacgtctcggtgtagtcaatgccgtacttctgcttgaagcccttggccacgaggcgcgccttgtacttctcgatcgagccgtccgctttgcgcttgatcttgaacacccacttggtcgttgtccgttaggcaacttggcagctcgaaacacaccacgcagtcgcatcgacttgagctccgcgcggatcgctttgcgccagtgcacttgatcaggaccgttcacagcctcttggaacgtcgtcggctccgatagatcggctgctgcttccacagcgttggcactggcacgccaaaacactggaggcgtcgagtcgtcgtcttcatcttggtccccagacttttcttcttcgtcggggtcggctcggcgcgaggaggatacgtccggcgcacttgcttcttctaagccagctcggtggcgaacggggcgcgatcttctggcagtgttgtcgtcgccactcggtcggtacttgcgcttccccgcctgcttgaagctcgtttggcgcggtccatcgttgtcgtccaggtccagcgcgtccaagtccagcacagcatcatcgacgtcttcatccgaagtatgcgtcgaaagtccaaaggtcgactcatcgaagttgacatcgcgactgataaccacctgccccgcctcgatgtcataaactcgatacgccttggacacttcttcgtagccgaggaacagcccggcgcgagccttggggtcccacttgcgccgtctttccttcggcgtcaggatgtacgtctggcatccgaacacacgcatgtgcttcacactcggcttggacttgtaaacgatctcgaacggagtcttgtgttcgatcttgggtgatggcagacgattcttcaagtagatggctgtcatggccgcctcagcccagaagctcttgtccagcttggcatgatgcagcatgctgcggccaatcgtggcgatggtccggatggcgcgttctgccgtgccgttggtctggtgcgcgtgcggaaccgtggtttgctgctcgatgccttcgacttcgtagaaggccttgagcgagttggtcgcgaactcacgggctccgtcgtgccgcacaaacttgaccttcttgccgaactgcgtctgcaccttcgtgacgtacatcttgatgcagtcctcgctctccgacttggcacgcaggcagaaccccttcatgcatccgctggcttcgtccacgatcagcagcagatacttgctgccacccagtgactcttcttccatggggccgcacacgtcgaagtggagcagctcgaacgtgtcgtagtgacgcttgtcacggttgcttgggaacggcttctggaccattttcccttgctggcagccgcgacacacgcttggtccactcgacttggaaggtgccttcgcgtccttgatcatgttgttgtcgaccatcttgcgaagcacctccaccggagcgtgacccatacgcgcgtgtaagtcgaccgtcttcccactggtcgccgcattcgccgatcgctgaggcgtctggagccagtagagtccatccacgaggtttgccgtcgccaccacttgcttggagcccttgtgcgcaatctgcatcttggtgctgtcgaacacgacttggagcagaccactcttgttgatctgtggcaccgaaagcagattcttgctcatgcttgggacgtacagcgcgttcttgatctcgatgtcgcgctcgtcgccgttgggcagaaccactcgttccacgatggtccccacacccatgatggccgccttgttgccgtcggccaccgaaagttcgccttcattccgctcaatcaaatgaacgaacttggccttgtcgttgcagatgtggtgcgttgcgccgctgtcaaccgcccacaacccggacacattcttgcccgtcgaaatgccacactccagtgagaccgcgaacgccactcgatcatagccgtagtcgtagttgtagctggcgtcgtcgttcctccactgggcattgttggccccgcgtccacggccattgccattgccgccgcgtcttgggccccgattctcgtccttctgcttggtccagcacttgtcaatcgtgtgccccaatttcccgcagtacgtacactggcgagactctcggtcggtgttgaacgccttggccgcattctccgtcttcaccgtcgccgccttctcgccttgtctcttgatgtgctcattcgtcagcaccttcacgacgtcttgcgatcgtagttcagcgctgctcatctccaagttcagcacgacgttctcgtagctcttggggaggctgcgcaacaggcagatcgccacgtcctcatcctccatcttggcgccgatgctgctgagcttggcgctgatgttgaggacctcgttgcaatgatgcaagacgttgccgccttccgacatctccatgctgaagagttggcgcttcaggtagatgcgtccagccttctgcgaaccaccgtacagcgtcttcaggcgcgtccacgcaacccacgcttcctcgcagtcgtcgaccacatggtggtagtccgcgtccatgtggagcaacatcagtccgaacgcgatgttgctcgacttgacgtagtcgtccttggcccgcgagtccgtgaagctcggcgtcgtctcgcggttcacgacatgccacgtcgacttggtcaggaacacgccacgcatgtagcggttccacgtcgcgtagttgtccccgttgaacttgtcaatggagaccttggtcgaggcgtcttgggcagaggacatggtgcttgggctcataacctgatggaaggtatggatcttggacacgaagctcggacgaagcggagggagggacgtcgcagacggtgggaccggagcgaaggcacttgaggggtagaatgaagattcgaaagtgattgaattgttggagcttacaccctactgttatagacacgcgaccctgcgtcctatcacctagtgcatctaatcaaccatcactcaccggtgttcatccaatcatcctactcgtctaatcatcggtggcgtaaacaacttaccgtaatcaccataatcaacgtgggttcggattggaccggttcgggttaaccggttaatgggtacaactggtacacagtacccaagaccagcaaccctcaatagaagctgggcatcgtggtcgctgacgagtcgagtgggagtgttgtcaagactgatgtgacgacgccccgccaagcgaccgtgtgacgcgaacgcgtcatcagtgaggtcggcgtgaccttcactgtgtggtaccgaaatcattcaggtgattacgggacgatgattacgtcacggtgattacgccaagattgtgggtacaagatgggcatcgacgtggcgttctctgattggataaggtaactgtgtatccagtagagaatccagtagggtgtatccagtaagaggtatccagtagcaggcttagaggtagcacgcggttgcgaactaaggacctgaatcgaatcactttgcattttgccaactactgctcaagtgctcttccttttggttatgagcccaagccccgtcttccctgaccaagaccccgactacgccttcgccatggacgccgccccgaccgcgaccgcccgcatcaacaagttcgacggaaccaacttccacacatggaagttcaagatgcagatggtgctggaggagcgcgaactgtgggaagtgacgagtggggaagtgaagctcgagcagtgcacgaccgcggcggaccaagcgacgtttcgcaagaagtcgcgcaaggcgctggcgatcgtctgtctcgcgttggaggactcgcagctgccgctggtgcggtcggcgaaggacgcgcatgatgcatggtcaagactcgagggacacttcgagaagaagagcctggcgaacaagctctttcttcgtcgacggttcttcacgacaacgatggacgaaggtgatgatgtgctggagcacattaacaagctcaagacgctggcggaacagctcgacgcggtcggcgctccggtcagcgaggacgacttggtgatcacgcttcttgccagtctgagcgagtcgtaccagttcctcatcacggcgttggaatcgcgttccgacacgctgacgtgggagctcgtgacgtctcggctcctgcacgaggacatgaagcgcaagggacggcaggcgcaagcgcagaggacgagcgcctgtcactactgcggcgagcacggacattggatcgccaagtgtccggtgcggatccgcgagaacggggagcggcagaggccgcaacgagcgaacgtcgcgcaggtcgaagatgactctggcgacttcctcttctcggttggtggcgacacgggtgcctccaagctgagcggcatgtggctggtcgactcgggtgcgacgcagcacatgacgtactcgaaggagtacatgaagaactacaagaagatctctccggtggacgtgcatctggcggacgacggcgtggttcaggcggtggggagcggcgacatcgtgatgtcgatgcagacaccgcgcggcatgaagaagggtgtgctcacgggtgtgtggcacatcccgaagctgtcgcgcaacctgttctccgtcggccgcttcaccaaggacgtcgggccagtgaccttcgagagcgacgggtgcttcgcggaaacgaagggtctcaagtggaagctcggcgctcgcgaaggcaaaggactgttcaagctctgcatgacgccgaggacgcctgctgacgaggccaatgcggcaagctcgaagaatcgccaaggggacaccacgtcgtacctctggcaccttcgacttggtcacatcggccatggtggtctcgacgccatcgtcaagaagggctacggcactggcatcccaatgacgtcggtgaagcagtgggaggtgtgcgacgggtgcgcactcggcaagcaaacgcgagtaagcttcatgaagtcgtcgccgaaccgtgcgaagcaagtgctggaggtggtccacagcgatgtgtgcggtccgatgcagacggcgacgttcggaggcaagcgctacttcgtcacgttcatcgacgacaagtcgcacttctgcgtggtgtacctgctacggaacaagtcggaggtggctgccaagttcgctgcgttcgtcgcgttggctgagacgcagaccggcaagcgagtgaaggtgcttcggagcgacaacggcggcgagtacacttcgggtgcgatggccaagttgtgtgcggatcgcggcatcgagcagaagttcacgccgccatacacgcctcagctcaacggagtggccgagcgaatgaatcggacgctggtggagtgtgcgcgctgcatgctggagcacgccgggttgtcgaaggagtactggggagaagcggtgatgacggccacgttcctccgcaaccggtgtccgacgcgcgccatcagtcacgacaagtcgccgcaccacgtttggactggcaagaagcctttgctggccaacctcaaggtgttcgggtgccacgcgtacgtgcacgtgccgaaggagaagcggtcgaagttcgacgctcggtcggtgcgctgtcgtttcctcgggtactcggagcacgagaaggcgtatcggttcgaggagatcgagagcggtcgcgtgttggtgagccgcgacgcgcagttcatggaagatgtcttcgacggtgggagacgcgactacgcttcgaaggaggtgttggtgggtcttccgacagatgatgatgaagacaccacggatgaagagactcagtccggataagacgagaacagagaagaagctgcgcggaatcaagactttgaacccggcagcaagcgacacccgcgcacgcagtcgctcgaggaagccgtggaggttccgagtgccaagcggtatgcggtgccgagacgacagcagccgctggacgagatgtctgccgcagcacaagagaaggaagacttcgaggctgcgtacgtcgtggattcagtgggagagatgccgacaacgttcaagtcggcgatggaatccagcgacgcagacaagtggaaagaggcgtgcgactcggaggtggagtcgctccgcaagaacgagacgtggaccctggtgccactgccgaagggacgcaaggcgatcggctgcagatgggtgttccgcgtgaaggagaaccagtctggagagatcgagcggttcaaggcgcgactggtggcgaaggggttctcgcagaagtacggcatcgactacgacgagacgttcgcgccggtggccaagttcacgtcgattcgggtgttgctgagtctggcggccaagtacaagctcacagtgcaccagatggatgtgaagaccgcgttcctcaacggcttgttggacgaggacatctacatggcgcagccggacggatatgtggacggagatcgacccgactacgtgtgccggctcaagcgttcgctgtacggcctgaagcagtcgccgcggatgtggaacaagacgatcgacgagttcatgttgaagctggggttcaagaagtgcgagtccgaccactgcatctacttgaagcgggacaatcacgacatgatgttcgtggcactgtacgtggacgatctggtcctcgccagcagcagcgacaggatgctgaaggacacgaagcaggcgctgagtgaccggttcgagatgaccgacatgggccagctcaagtactttctcggtatggagatcgagcaagatgtggcgactgggaaggtgtcggtgcggcagaccaagttcgcgaaggacattctcgagaagttcaagatggatgagagcaaccctgtgaagacaccacaggatccgggtctgaagctgaccaaggccatgtgcgagggaggctgcaagcacgacgagaccatggcgaatgttccgtaccggaacgccgtgggctgcctcatgtatctcatggtggggactcgtccggacctcgcagcggcagtgggagtgctgagccagttcgcagcggacccatgtccgacacactggcaggcgctcaagagggtcttccgctacatccgaggcacgaagacgcacggcctcgtgtttcaagcgagcagcgaggacggactgcaaggctactcggacgcggactgggccggcgacatcgagtctcgacggagtacgagcggctacgcgttcatgatgaacggcggatgcatcagctggcgaagcaagaagcagcgcacggtggcgctctcgtcgacggaagccgagtacatggcgctgtcggaggccacgcaggaggcggtgtggctcaaggtgtttctgtgcgagctgggcgagatggcgagcgatgaaggggtgaagatctacgaggacaaccaaggctccatcgcgttggccaagaacccggagttccacaagcgcaccaagcacatcgacattcgctaccacttcgtgcgcgagaaggtggaagacggtcaagtggtgttgcagtatgtttcgacactcgacatgctggcggacatcatgacgaagccgatcgcggcgccgcagttcgacgcgctcaggacgaagctgggcatcgtggtcgctgacgagtcgagtgggagtgttgtcaagactgatgtgacgacgcctcgccaagcgaccgtgtgacgcgaacgcgtcatcagtgaggtcggcgtgaccttcactgtgtggtaccgaaatcattcaggtgattacgggacgatgattacgtcacggtgattacgccaagattgtgggtacaagatgggcatcgacgtggcgttctctgattggataaggtaactgtgtatccagtagagaatccagtagggtgtatccagtaagaggtatccagtagcaggcttagaggtagcacgcggttgcgaactaaggacctgaatcgaatcactttgcattttgccaactactgctcaagtgctcttccttttggttatgagcccaagccccgtcttccctgaccaagaccccgactacgccttcgccatggacgccgccccgaccgcgaccgcccgcatcaacaagttcgacggaaccaacttccacacatggaagttcaagatgcagatggtactggaggagcgcgaactgtgggaagtgacgagtggggaagtgaagctcgagcagtgcacgaccgcggcggaccaagcgacgtttcgcaagaagtcgcgcaaggcgctggcgatcgtctgtctcgcgttggaggactcgcagctgccgctggtgcggtcggcgaaggacgcgcatgatgcatggtcaagactcgagggacacttcgagaagaagagcctggcgaacaagctctttcttcgtcgacggttcttcacgacaacgatggacgaaggtgatgatgtgctggagcacattaacaagctcaagacgctggcggaacagctcgacgcggtcggcgctccggtcagcgaggacgacttggtgatcacgcttcttgccagtctgagcgagtcgtaccagttcctcatcacggcgttggaatcgcgttccgacacgctgacgtgggagctcgtgacgtctcggctcctgcacgaggacatgaagcgcaaggaacaaggtggcggtgctgacggaaccgcgcacgctcaaggtcaagcgttcatgacaagcgacaacgggaagcgcaagggacggcaggcgcaagcgcagaggacgagcgcctgtcactactgcggcgagcacggacatnnnnnnnnnnnnnnnnnnnnnnnnnnnnnnnnnnnnnnnnnnnnnnnnnnnnnnnnnnnnnnnnnnnnnnnnnnnnnnnnnnnnnnnnnnnnnnnnnnnnnnnnnnnnnnnnnnnnnnnnnnnnnnnnnnnnnnnnnnnnnnnnnnnnnnnnnnnnnnnnnnnnnnnnnnnnnnnnnnnnnnnnnnnnnnnnnnnnnnnnnnnnnnnnnnnnnnnnnnnnnnnnnnnnnnnnnnnnnnnnnnnnnnnnnnnnnnnnnnnnnnnnnnnnnnnnnnnnnnnnnnnnnnnnnnnnnnnnnnnnnnnnnnnnnnnnnnnnnnnnnnnnnnnnnnnnnnnnnnnnnnnnnnnnnnnnnnnnnnnnnnnnnnnnnnnnnnnnnnnnnnnnnnnnnnnnnnnnnnnnnnnnnnnnnnnnnnnnnnnnnnnnnnnnnnnnnnnnnnnnnnnnnnnnnnnnnnnnnnnnnnnnnnnnnnnnnnnnnnnnnnnnnnnnnnnnnnnnnnnnnnnnnnnnnnnnnnnnnnnnnnnnnnnnnnnnnnnnnnnnnnnnnnnnnnnnnnnnnnnnnnnnnnnnnnnnnnnnnnnnnnnnnnnnnnnnnnnnnnnnnnnnnnnnnnnnnnnnnnnnnnnnnnnnnnnnnnnnnnnnnnnnnnnnnnnnnnnnnnnnnnnnnnnnnnnnnnnnnnnnnnnnnnnnnnnnnnnnnnnnnnnnnnnnnnnnnnnnnnnnnnnnnnnnnnnnnnnnnnnnnnnnnnnnnnnnnnnnnnnnnnnnnnnnnnnnnnnnnnnnnnnnnnnnnnnnnnnnnnnnnnnnnnnnnnnnnnnnnnnnnnnnnnnnnnnnnnnnnnnnnnnnnnnnnnnnnnnnnnnnnnnnnnnnnnnnnnnnnnnnnnnnnnnnnnnnnnnnnnnnnnnnnnnnnnnnnnnnnnnnnnnnnnnnnnnnnnnnnnnnnnnnnnnnnnnnnnnnnnnnnnnnnnnnnnnnnnnnnnnnnnnnnnnnnnnnnnnnnnnnnnnnnnnnnnnnnnnnnnnnnnnnnnnnnnnnnnnnnnnnnnnnnnnnnnnnnnnnnnnnnnnnnnnnnnnnnnnnnnnnnnnnnnnnnnnnnnnnnnnnnnnnnnnnnnnnnnnnnnnnnnnnnnnnnnnnnnnnnnnnnnnnnnnnnnnnnnnnnnnnnnnnnnnnnnnnnnnnnnnnnnnnnnnnnnnnnnnnnnnnnnnnnnnnnnnnnnnnnnnnnnnnnnnnnnnnnnnnnnnnnnnnnnnnnnnnnnnnnnnnnnnnnnnnnnnnnnnnnnnnnnnnnnnnnnnnnnnnnnnnnnnnnnnnnnnnnnnnnnnnnnnnnnnnnnnnnnnnnnnnnnnnnnnnnnnnnnnnnnnnnnnnnnnnnnnnnnnnnnnnnnnnnnnnnnnnnnnnnnnnnnnnnnnnnnnnnnnnnnnnnnnnnnnnnnnnnnnnnnnnnnnnnnnnnnnnnnnnnnnnnnnnnnnnnnnnnnnnnnnnnnnnnnnnnnnnnnnnnnnnnnnnnnnnnnnnnnnnnnnnnnnnnnnnnnnnnnnnnnnnnnnnnnnnnnnnnnnnnnnnnnnnnnnnnnnnnnnnnnnnnnnnnnnnnnnnnnnnnnnnnnnnnnnnnnnnnnnnnnnnnnnnnnnnnnnnnnnnnnnnnnnnnnnnnnnnnnnnnnnnnnnnnnnnnnnnnnnnnnnnnnnnnnnnnnnnnnnnnnnnnnnnnnnnnnnnnnnnnnnnnnnnnnnnnnnnnnnnnnnnnnnnnnnnnnnnnnnnnnnnnnnnnnnnnnnnnnnnnnnnnnnnnnnnnnnnnnnnnnnnnnnnnnnnnnnnnnnnnnnnnnnnnnnnnnnnnnnnnnnnnnnnnnnnnnnnnnnnnnnnnnnnnnnnnnnnnnnnnnnnnnnnnnnnnnnnnnnnnnnnnnnnnnnnnnnnnnnnnnnnnnnnnnnnnnnnnnnnnnnnnnnnnnnnnnnnnnnnnnnnnnnnnnnnnnnnnnnnnnnnnnnnnnnnnnnnnnnnnnnnnnnnnnnnnnnnnnnnnnnnnnnnnnnnnnnnnnnnnnnnnnnnnnnnnnnnnnnnnnnnnnnnnnnnnnnnnnnnnnnnnnnnnnnnnnnnnnnnnnnnnnnnnnnnnnnnnnnnnnnnnnnnnnnnnnnnnnnnnnnnnnnnnnnnnnnnnnnnnnnnnnnnnnnnnnnnnnnnnnnnnnnnnnnnnnnnnnnnnnnnnnnnnnnnnnnnnnnnnnnnnnnnnnnnnnnnnnnnnnnnnnnnnnnnnnnnnnnnnnnnnnnnnnnnnnnnnnnnnnnnnnnnnnnnnnnnnnnnnnnnnnnnnnnnnnnnnnnnnnnnnnnnnnnnnnnnnnnnnnnnnnnnnnnnnnnnnnnnnnnnnnnnnnnnnnnnnnnnnnnnnnnnnnnnnnnnnnnnnnnnnnnnnnnnnnnnnnnnnnnnnnnnnnnnnnnnnnnnnnnnnnnnnnnnnnnnnnnnnnnnnnnnnnnnnnnnnnnnnnnnnnnnnnnnnnnnnnnnnnnnnnnnnnnnnnnnnnnnnnnnnnnnnnnnnnnnnnnnnnnnnnnnnnnnnnnnnnnnnnnnnnnnnnnnnnnnnnnnnnnnnnnnnnnnnnnnnnnnnnnnnnnnnnnnnnnnnnnnnnnnnnnnnnnnnnnnnnnnnnnnnnnnnnnnnnnnnnnnnnnnnnnnnnnnnnnnnnnnnnnnnnnnnnnnnnnnnnnnnnnnnnnnnnnnnnnnnnnnnnnnnnnnnnnnnnnnnnnnnnnnnnnnnnnnnnnnnnnnnnnnnnnnnnnnnnnnnnnnnnnnnnnnnnnnnnnnnnnnnnnnnnnnnnnnnnnnnnnnnnnnnnnnnnnnnnnnnnnnnnnnnnnnnnnnnnnnnnnnnnnnnnnnnnnnnnnnnnnnnnnnnnnnnnnnnnnnnnnnnnnnnnnnnnnnnnnnnnnnnnnnnnnnnnnnnnnnnnnnnnnnnnnnnnnnnnnnnnnnnnnnnnnnnnnnnnnnnnnnnnnnnnnnnnnnnnnnnnnnnnnnnnnnnnnnnnnnnnnnnnnnnnnnnnnnnnnnnnnnnnnnnnnnnnnnnnnnnnnnnnnnnnnnnnnnnnnnnnnnnnnnnnnnnnnnnnnnnnnnnnnnnnnnnnnnnnnnnnnnnnnnnnnnnnnnnnnnnnnnnnnnnnnnnnnnnnnnnnnnnnnnnnnnnnnnnnnnnnnnnnnnnnnnnnnnnnnnnnnnnnnnnnnnnnnnnnnnnnnnnnnnnnnnnnnnnnnnnnnnnnnnnnnnnnnnnnnnnnnnnnnnnnnnnnnnnnnnnnnnnnnnnnnnnnnnnnnnnnnnnnnnnnnnnnnnnnnnnnnnnnnnnnnnnnnnnnnnnnnnnnnnnnnnnnnnnnnnnnnnnnnnnnnnnnnnnnnnnnnnnnnnnnnnnnnnnnnnnnnnnnnnnnnnnnnnnnnnnnnnnnnnnnnnnnnnnnnnnnnnnnnnnnnnnnnnnnnnnnnnnnnnnnnnnnnnnnnnnnnnnnnnnnnnnnnnnnnnnnnnnnnnnnnnnnnnnnnnnnnnnnnnnnnnnnnnnnnnnnnnnnnnnnnnnnnnnnnnnnnnnnnnnnnnnnnnnnnnnnnnnnnnnnnnnnnnnnnnnnnnnnnnnnnnnnnnnnnnnnnnnnnnnnnnnnnnnnnnnnnnnnnnnnnnnnnnnnnnnnnnnnnnnnnnnnnnnnnnnnnnnnnnnnnnnnnnnnnnnnnnnnnnnnnnnnnnnnnnnnnnnnnnnnnnnnnnnnnnnnnnnnnnnnnnnnnnnnnnnnnnnnnnnnnnnnnnnnnnnnnnnnnnnnnnnnnnnnnnnnnnnnnnnnnnnnnnnnnnnnnnnnnnnnnnnnnnnnnnnnnnnnnnnnnnnnnnnnnnnnnnnnnnnnnnnnnnnnnnnnnnnnnnnnnnnnnnnnnnnnnnnnnnnnnnnnnnnnnnnnnnnnnnnnnnnnnnnnnnnnnnnnnnnnnnnnnnnnnnnnnnnnnnnnnnnnnnnnnnnnnnnnnnnnnnnnnnnnnnnnnnnnnnnnnnnnnnnnnnnnnnnnnnnnnnnnnnnnnnnnnnnnnnnnnnnnnnnnnnnnnnnnnnnnnnnnnnnnnnnnnnnnnnnnnnnnnnnnnnnnnnnnnnnnnnnnnnnnnnnnnnnnnnnnnnnnnnnnnnnnnnnnnnnnnnnnnnnnnnnnnnnnnnnnnnnnnnnnnnnnnnnnnnnnnnnnnnnnnnnnnnnnnnnnnnnnnnnnnnnnnnnnnnnnnnnnnnnnnnnnnnnnnnnnnnnnnnnnnnnnnnnnnnnnnnnnnnnnnnnnnnnnnnnnnnnnnnnnnnnnnnnnnnnnnnnnnnnnnnnnnnnnnnnnnnnnnnnnnnnnnnnnnnnnnnnnnnnnnnnnnnnnnnnnnnnnnnnnnnnnnnnnnnnnnnnnnnnnnnnnnnnnnnnnnnnnnnnnnnnnnnnnnnnnnnnnnnnnnnnnnnnnnnnnnnnnnnnnnnnnnnnnnnnnnnnnnnnnnnnnnnnnnnnnnnnnnnnnnnnnnnnnnnnnnnnnnnnnnnnnnnnnnnnnnnnnnnnnnnnnnnnnnnnnnnnnnnnnnnnnnnnnnnnnnnnnnnnnnnnnnnnnnnnnnnnnnnnnnnnnnnnnnnnnnnnnnnnnnnnnnnnnnnnnnnnnnnnnnnnnnnnnnnnnnnnnnnnnnnnnnnnnnnnnnnnnnnnnnnnnnnnnnnnnnnnnnnnnnnnnnnnnnnnnnnnnnnnnnnnnnnnnnnnnnnnnnnnnnnnnnnnnnnnnnnnnnnnnnnnnnnnnnnnnnnnnnnnnnnnnnnnnnnnnnnnnnnnnnnnnnnnnnnnnnnnnnnnnnnnnnnnnnnnnnnnnnnnnnnnnnnnnnnnnnnnnnnnnnnnnnnnnnnnnnnnnnnnnnnnnnnnnnnnnnnnnnnnnnnnnnnnnnnnnnnnnnnnnnnnnnnnnnnnnnnnnnnnnnnnnnnnnnnnnnnnnnnnnnnnnnnnnnnnnnnnnnnnnnnnnnnnnnnnnnnnnnnnnnnnnnnnnnnnnnnnnnnnnnnnnnnnnnnnnnnnnnnnnnnnnnnnnnnnnnnnnnnnnnnnnnnnnnnnnnnnnnnnnnnnnnnnnnnnnnnnnnnnnnnnnnnnnnnnnnnnnnnnnnnnnnnnnnnnnnnnnnnnnnnnnnnnnnnnnnnnnnnnnnnnnnnnnnnnnnnnnnnnnnnnnnnnnnnnnnnnnnnnnnnnnnnnnnnnnnnnnnnnnnnnnnnnnnnnnnnnnnnnnnnnnnnnnnnnnnnnnnnnnnnnnnnnnnnnnnnnnnnnnnnnnnnnnnnnnnnnnnnnnnnnnnnnnnnnnnnnnnnnnnnnnnnnnnnnnnnnnnnnnnnnnnnnnnnnnnnnnnnnnnnnnnnnnnnnnnnnnnnnnnnnnnnnnnnnnnnnnnnnnnnnnnnnnnnnnnnnnnnnnnnnnnnnnnnnnnnnnnnnnnnnnnnnnnnnnnnnnnnnnnnnnnnnnnnnnnnnnnnnnnnnnnnnnnnnnnnnnnnnnnnnnnnnnnnnnnnnnnnnnnnnnnnnnnnnnnnnnnnnnnnnnnnnnnnnnnnnnnnnnnnnnnnnnnnnnnnnnnnnnnnnnnnnnnnnnnnnnnnnnnnnnnnnnnnnnnnnnnnnnnnnnnnnnnnnnnnnnnnnnnnnnnnnnnnnnnnnnnnnnnnnnnnnnnnnnnnnnnnnnnnnnnnnnnnnnnnnnnnnnnnnnnnnnnnnnnnnnnnnnnnnnnnnnnnnnnnnnnnnnnnnnnnnnnnnnnnnnnnnnnnnnnnnnnnnnnnnnnnnnnnnnnnnnnnnnnnnnnnnnnnnnnnnnnnnnnnnnnnnnnnnnnnnnnnnnnnnnnnnnnnnnnnnnnnnnnnnnnnnnnnnnnnnnnnnnnnnnnnnnnnnnnnnnnnnnnnnnnnnnnnnnnnnnnnnnnnnnnnnnnnnnnnnnnnnnnnnnnnnnnnnnnnnnnnnnnnnnnnnnnnnnnnnnnnnnnnnnnnnnnnnnnnnnnnnnnnnnnnnnnnnnnnnnnnnnnnnnnnnnnnnnnnnnnnnnnnnnnnnnnnnnnnnnnnnnnnnnnnnnnnnnnnnnnnnnnnnnnnnnnnnnnnnnnnnnnnnnnnnnnnnnnnnnnnnnnnnnnnnnnnnnnnnnnnnnnnnnnnnnnnnnnnnnnnnnnnnnnnnnnnnnnnnnnnnnnnnnnnnnnnnnnnnnnnnnnnnnnnnnnnnnnnnnnnnnnnnnnnnnnnnnnnnnnnnnnnnnnnnnnnnnnnnnnnnnnnnnnnnnnnnnnnnnnnnnnnnnnnnnnnnnnnnnnnnnnnnnnnnnnnnnnnnnnnnnnnnnnnnnnnnnnnnnnnnnnnnnnnnnnnnnnnnnnnnnnnnnnnnnnnnnnnnnnnnnnnnnnnnnnnnnnnnnnnnnnnnnnnnnnnnnnnnnnnnnnnnnnnnnnnnnnnnnnnnnnnnnnnnnnnnnnnnnnnnnnnnnnnnnnnnnnnnnnnnnnnnnnnnnnnnnnnnnnnnnnnnnnnnnnnnnnnnnnnnnnnnnnnnnnnnnnnnnnnnnnnnnnnnnnnnnnnnnnnnnnnnnnnnnnnnnnnnnnnnnnnnnnnnnnnnnnnnnnnnnnnnnnnnnnnnnnnnnnnnnnnnnnnnnnnnnnnnnnnnnnnnnnnnnnnnnnnnnnnnnnnnnnnnnnnnnnnnnnnnnnnnnnnnnnnnnnnnnnnnnnnnnnnnnnnnnnnnnnnnnnnnnnnnnnnnnnnnnnnnnnnnnnnnnnnnnnnnnnnnnnnnnnnnnnnnnnnnnnnnnnnnnnnnnnnnnnnnnnnnnnnnnnnnnnnnnnnnnnnnnnnnnnnnnnnnnnnnnnnnnnnnnnnnnnnnnnnnnnnnnnnnnnnnnnnnnnnnnnnnnnnnnnnnnnnnnnnnnnnnnnnnnnnnnnnnnnnnnnnnnnnnnnnnnnnnnnnnnnnnnnnnnnnnnnnnnnnnnnnnnnnnnnnnnnnnnnnnnnnnnnnnnnnnnnnnnnnnnnnnnnnnnnnnnnnnnnnnnnnnnnnnnnnnnnnnnnnnnnnnnnnnnnnnnnnnnnnnnnnnnnnnnnnnnnnnnnnnnnnnnnnnnnnnnnnnnnnnnnnnnnnnnnnnnnnnnnnnnnnnnnnnnnnnnnnnnnnnnnnnnnnnnnnnnnnnnnnnnnnnnnnnnnnnnnnnnnnnnnnnnnnnnnnnnnnnnnnnnnnnnnnnnnnnnnnnnnnnnnnnnnnnnnnnnnnnnnnnnnnnnnnnnnnnnnnnnnnnnnnnnnnnnnnnnnnnnnnnnnnnnnnnnnnnnnnnnnnnnnnnnnnnnnnnnnnnnnnnnnnnnnnnnnnnnnnnnnnnnnnnnnnnnnnnnnnnnnnnnnnnnnnnnnnnnnnnnnnnnnnnnnnnnnnnnnnnnnnnnnnnnnnnnnnnnnnnnnnnnnnnnnnnnnnnnnnnnnnnnnnnnnnnnnnnnnnnnnnnnnnnnnnnnnnnnnnnnnnnnnnnnnnnnnnnnnnnnnnnnnnnnnnnnnnnnnnnnnnnnnnnnnnnnnnnnnnnnnnnnnnnnnnnnnnnnnnnnnnnnnnnnnnnnnnnnnnnnnnnnnnnnnnnnnnnnnnnnnnnnnnnnnnnnnnnnnnnnnnnnnnnnnnnnnnnnnnnnnnnnnnnnnnnnnnnnnnnnnnnnnnnnnnnnnnnnnnnnnnnnnnnnnnnnnnnnnnnnnnnnnnnnnnnnnnnnnnnnnnnnnnnnnnnnnnnnnnnnnnnnnnnnnnnnnnnnnnnnnnnnnnnnnnnnnnnnnnnnnnnnnnnnnnnnnnnnnnnnnnnnnnnnnnnnnnnnnnnnnnnnnnnnnnnnnnnnnnnnnnnnnnnnnnnnnnnnnnnnnnnnnnnnnnnnnnnnnnnnnnnnnnnnnnnnnnnnnnnnnnnnnnnnnnnnnnnnnnnnnnnnnnnnnnnnnnnnnnnnnnnnnnnnnnnnnnnnnnnnnnnnnnnnnnnnnnnnnnnnnnnnnnnnnnnnnnnnnnnnnnnnnnnnnnnnnnnnnnnnnnnnnnnnnnnnnnnnnnnnnnnnnnnnnnnnnnnnnnnnnnnnnnnnnnnnnnnnnnnnnnnnnnnnnnnnnnnnnnnnnnnnnnnnnnnnnnnnnnnnnnnnnnnnnnnnnnnnnnnnnnnnnnnnnnnnnnnnnnnnnnnnnnnnnnnnnnnnnnnnnnnnnnnnnnnnnnnnnnnnnnnnnnnnnnnnnnnnnnnnnnnnnnnnnnnnnnnnnnnnnnnnnnnnnnnnnnnnnnnnnnnnnnnnnnnnnnnnnnnnnnnnnnnnnnnnnnnnnnnnnnnnnnnnnnnnnnnnnnnnnnnnnnnnnnnnnnnnnnnnnnnnnnnnnnnnnnnnnnnnnnnnnnnnnnnnnnnnnnnnnnnnnnnnnnnnnnnnnnnnnnnnnnnnnnnnnnnnnnnnnnnnnnnnnnnnnnnnnnnnnnnnnnnnnnnnnnnnnnnnnnnnnnnnnnnnnnnnnnnnnnnnnnnnnnnnnnnnnnnnnnnnnnnnnnnnnnnnnnnnnnnnnnnnnnnnnnnnnnnnnnnnnnnnnnnnnnnnnnnnnnnnnnnnnnnnnnnnnnnnnnnnnnnnnnnnnnnnnnnnnnnnnnnnnnnnnnnnnnnnnnnnnnnnnnnnnnnnnnnnnnnnnnnnnnnnnnnnnnnnnnnnnnnnnnnnnnnnnnnnnnnnnnnnnnnnnnnnnnnnnnnnnnnnnnnnnnnnnnnnnnnnnnnnnnnnnnnnnnnnnnnnnnnnnnnnnnnnnnnnnnnnnnnnnnnnnnnnnnnnnnnnnnnnnnnnnnnnnnnnnnnnnnnnnnnnnnnnnnnnnnnnnnnnnnnnnnnnnnnnnnnnnnnnnnnnnnnnnnnnnnnnnnnnnnnnnnnnnnnnnnnnnnnnnnnnnnnnnnnnnnnnnnnnnnnnnnnnnnnnnnnnnnnnnnnnnnnnnnnnnnnnnnnnnnnnnnnnnnnnnnnnnnnnnnnnnnnnnnnnnnnnnnnnnnnnnnnnnnnnnnnnnnnnnnnnnnnnnnnnnnnnnnnnnnnnnnnnnnnnnnnnnnnnnnnnnnnnnnnnnnnnnnnnnnnnnnnnnnnnnnnnnnnnnnnnnnnnnnnnnnnnnnnnnnnnnnnnnnnnnnnnnnnnnnnnnnnnnnnnnnnnnnnnnnnnnnnnnnnnnnnnnnnnnnnnnnnnnnnnnnnnnnnnnnnnnnnnnnnnnnnnnnnnnnnnnnnnnnnnnnnnnnnnnnnnnnnnnnnnnnnnnnnnnnnnnnnnnnnnnnnnnnnnnnnnnnnnnnnnnnnnnnnnnnnnnnnnnnnnnnnnnnnnnnnnnnnnnnnnnnnnnnnnnnnnnnnnnnnnnnnnnnnnnnnnnnnnnnnnnnnnnnnnnnnnnnnnnnnnnnnnnnnnnnnnnnnnnnnnnnnnnnnnnnnnnnnnnnnnnnnnnnnnnnnnnnnnnnnnnnnnnnnnnnnnnnnnnnnnnnnnnnnnnnnnnnnnnnnnnnnnnnnnnnnnnnnnnnnnnnnnnnnnnnnnnnnnnnnnnnnnnnnnnnnnnnnnnnnnnnnnnnnnnnnnnnnnnnnnnnnnnnnnnnnnnnnnnnnnnnnnnnnnnnnnnnnnnnnnnnnnnnnnnnnnnnnnnnnnnnnnnnnnnnnnnnnnnnnnnnnnnnnnnnnnnnnnnnnnnnnnnnnnnnnnnnnnnnnnnnnnnnnnnnnnnnnnnnnnnnnnnnnnnnnnnnnnnnnnnnnnnnnnnnnnnnnnnnnnnnnnnnnnnnnnnnnnnnnnnnnnnnnnnnnnnnnnnnnnnnnnnnnnnnnnnnnnnnnnnnnnnnnnnnnnnnnnnnnnnnnnnnnnnnnnnnnnnnnnnnnnnnnnnnnnnnnnnnnnnnnnnnnnnnnnnnnnnnnnnnnnnnnnnnnnnnnnnnnnnnnnnnnnnnnnnnnnnnnnnnnnnnnnnnnnnnnnnnnnnnnnnnnnnnnnnnnnnnnnnnnnnnnnnnnnnnnnnnnnnnnnnnnnnnnnnnnnnnnnnnnnnnnnnnnnnnnnnnnnnnnnnnnnnnnnnnnnnnnnnnnnnnnnnnnnnnnnnnnnnnnnnnnnnnnnnnnnnnnnnnnnnnnnnnnnnnnnnnnnnnnnnnnnnnnnnnnnnnnnnnnnnnnnnnnnnnnnnnnnnnnnnnnnnnnnnnnnnnnnnnnnnnnnnnnnnnnnnnnnnnnnnnnnnnnnnnnnnnnnnnnnnnnnnnnnnnnnnnnnnnnnnnnnnnnnnnnnnnnnnnnnnnnnnnnnnnnnnnnnnnnnnnnnnnnnnnnnnnnnnnnnnnnnnnnnnnnnnnnnnnnnnnnnnnnnnnnnnnnnnnnnnnnnnnnnnnnnnnnnnnnnnnnnnnnnnnnnnnnnnnnnnnnnnnnnnnnnnnnnnnnnnnnnnnnnnnnnnnnnnnnnnnnnnnnnnnnnnnnnnnnnnnnnnnnnnnnnnnnnnnnnnnnnnnnnnnnnnnnnnnnnnnnnnnnnnnnnnnnnnnnnnnnnnnnnnnnnnnnnnnnnnnnnnnnnnnnnnnnnnnnnnnnnnnnnnnnnnnnnnnnnnnnnnnnnnnnnnnnnnnnnnnnnnnnnnnnnnnnnnnnnnnnnnnnnnnnnnnnnnnnnnnnnnnnnnnnnnnnnnnnnnnnnnnnnnnnnnnnnnnnnnnnnnnnnnnnnnnnnnnnnnnnnnnnnnnnnnnnnnnnnnnnnnnnnnnnnnnnnnnnnnnnnnnnnnnnnnnnnnnnnnnnnnnnnnnnnnnnnnnnnnnnnnnnnnnnnnnnnnnnnnnnnnnnnnnnnnnnnnnnnnnnnnnnnnnnnnnnnnnnnnnnnnnnnnnnnnnnnnnnnnnnnnnnnnnnnnnnnnnnnnnnnnnnnnnnnnnnnnnnnnnnnnnnnnnnnnnnnnnnnnnnnnnnnnnnnnnnnnnnnnnnnnnnnnnnnnnnnnnnnnnnnnnnnnnnnnnnnnnnnnnnnnnnnnnnnnnnnnnnnnnnnnnnnnnnnnnnnnnnnnnnnnnnnnnnnnnnnnnnnnnnnnnnnnnnnnnnnnnnnnnnnnnnnnnnnnnnnnnnnnnnnnnnnnnnnnnnnnnnnnnnnnnnnnnnnnnnnnnnnnnnnnnnnnnnnnnnnnnnnnnnnnnnnnnnnnnnnnnnnnnnnnnnnnnnnnnnnnnnnnnnnnnnnnnnnnnnnnnnnnnnnnnnnnnnnnnnnnnnnnnnnnnnnnnnnnnnnnnnnnnnnnnnnnnnnnnnnnnnnnnnnnnnnnnnnnnnnnnnnnnnnnnnnnnnnnnnnnnnnnnnnnnnnnnnnnnnnnnnnnnnnnnnnnnnnnnnnnnnnnnnnnnnnnnnnnnnnnnnnnnnnnnnnnnnnnnnnnnnnnnnnnnnnnnnnnnnnnnnnnnnnnnnnnnnnnnnnnnnnnnnnnnnnnnnnnnnnnnnnnnnnnnnnnnnnnnnnnnnnnnnnnnnnnnnnnnnnnnnnnnnnnnnnnnnnnnnnnnnnnnnnnnnnnnnnnnnnnnnnnnnnnnnnnnnnnnnnnnnnnnnnnnnnnnnnnnnnnnnnnnnnnnnnnnnnnnnnnnnnnnnnnnnnnnnnnnnnnnnnnnnnnnnnnnnnnnnnnnnnnnnnnnnnnnnnnnnnnnnnnnnnnnnnnnnnnnnnnnnnnnnnnnnnnnnnnnnnnnnnnnnnnnnnnnnnnnnnnnnnnnnnnnnnnnnnnnnnnnnnnnnnnnnnnnnnnnnnnnnnnnnnnnnnnnnnnnnnnnnnnnnnnnnnnnnnnnnnnnnnnnnnnnnnnnnnnnnnnnnnnnnnnnnnnnnnnnnnnnnnnnnnnnnnnnnnnnnnnnnnnnnnnnnnnnnnnnnnnnnnnnnnnnnnnnnnnnnnnnnnnnnnnnnnnnnnnnnnnnnnnnnnnnnnnnnnnnnnnnnnnnnnnnnnnnnnnnnnnnnnnnnnnnnnnnnnnnnnnnnnnnnnnnnnnnnnnnnnnnnnnnnnnnnnnnnnnnnnnnnnnnnnnnnnnnnnnnnnnnnnnnnnnnnnnnnnnnnnnnnnnnnnnnnnnnnnnnnnnnnnnnnnnnnnnnnnnnnnnnnnnnnnnnnnnnnnnnnnnnnnnnnnnnnnnnnnnnnnnnnnnnnnnnnnnnnnnnnnnnnnnnnnnnnnnnnnnnnnnnnnnnnnnnnnnnnnnnnnnnnnnnnnnnnnnnnnnnnnnnnnnnnnnnnnnnnnnnnnnnnnnnnnnnnnnnnnnnnnnnnnnnnnnnnnnnnnnnnnnnnnnnnnnnnnnnnnnnnnnnnnnnnnnnnnnnnnnnnnnnnnnnnnnnnnnnnnnnnnnnnnnnnnnnnnnnnnnnnnnnnnnnnnnnnnnnnnnnnnnnnnnnnnnnnnnnnnnnnnnnnnnnnnnnnnnnnnnnnnnnnnnnnnnnnnnnnnnnnnnnnnnnnnnnnnnnnnnnnnnnnnnnnnnnnnnnnnnnnnnnnnnnnnnnnnnnnnnnnnnnnnnnnnnnnnnnnnnnnnnnnnnnnnnnnnnnnnnnnnnnnnnnnnnnnnnnnnnnnnnnnnnnnnnnnnnnnnnnnnnnnnnnnnnnnnnnnnnnnnnnnnnnnnnnnnnnnnnnnnnnnnnnnnnnnnnnnnnnnnnnnnnnnnnnnnnnnnnnnnnnnnnnnnnnnnnnnnnnnnnnnnnnnnnnnnnnnnnnnnnnnnnnnnnnnnnnnnnnnnnnnnnnnnnnnnnnnnnnnnnnnnnnnnnnnnnnnnnnnnnnnnnnnnnnnnnnnnnnnnnnnnnnnnnnnnnnnnnnnnnnnnnnnnnnnnnnnnnnnnnnnnnnnnnnnnnnnnnnnnnnnnnnnnnnnnnnnnnnnnnnnnnnnnnnnnnnnnnnnnnnnnnnnnnnnnnnnnnnnnnnnnnnnnnnnnnnnnnnnnnnnnnnnnnnnnnnnnnnnnnnnnnnnnnnnnnnnnnnnnnnnnnnnnnnnnnnnnnnnnnnnnnnnnnnnnnnnnnnnnnnnnnnnnnnnnnnnnnnnnnnnnnnnnnnnnnnnnnnnnnnnnnnnnnnnnnnnnnnnnnnnnnnnnnnnnnnnnnnnnnnnnnnnnnnnnnnnnnnnnnnnnnnnnnnnnnnnnnnnnnnnnnnnnnnnnnnnnnnnnnnnnnnnnnnnnnnnnnnnnnnnnnnnnnnnnnnnnnnnnnnnnnnnnnnnnnnnnnnnnnnnnnnnnnnnnnnnnnnnnnnnnnnnnnnnnnnnnnnnnnnnnnnnnnnnnnnnnnnnnnnnnnnnnnnnnnnnnnnnnnnnnnnnnnnnnnnnnnnnnnnnnnnnnnnnnnnnnnnnnnnnnnnnnnnnnnnnnnnnnnnnnnnnnnnnnnnnnnnnnnnnnnnnnnnnnnnnnnnnnnnnnnnnnnnnnnnnnnnnnnnnnnnnnnnnnnnnnnnnnnnnnnnnnnnnnnnnnnnnnnnnnnnnnnnnnnnnnnnnnnnnnnnnnnnnnnnnnnnnnnnnnnnnnnnnnnnnnnnnnnnnnnnnnnnnnnnnnnnnnnnnnnnnnnnnnnnnnnnnnnnnnnnnnnnnnnnnnnnnnnnnnnnnnnnnnnnnnnnnnnnnnnnnnnnnnnnnnnnnnnnnnnnnnnnnnnnnnnnnnnnnnnnnnnnnnnnnnnnnnnnnnnnnnnnnnnnnnnnnnnnnnnnnnnnnnnnnnnnnnnnnnnnnnnnnnnnnnnnnnnnnnnnnnnnnnnnnnnnnnnnnnnnnnnnnnnnnnnnnnnnnnnnnnnnnnnnnnnnnnnnnnnnnnnnnnnnnnnnnnnnnnnnnnnnnccgaaggagaagcggtcgaagttcgacgctcggtcggtgcgctgtcgtttcctcgggtactcggagcacgagaaggcgtatcggtttgaggagatcgagagcggtcgcgtgttggcgagccgcgacgcgcagttcatggaggatgtcttcgacggtgggagacgcgactacgcttcgaaggaggtgttggtgggtcttccgacagatgatgatgaagacaccacggatgaagagactcagtccggatcagacgagaacagagaagaagctgcgcggaatcaagactttgaacccggcagcaagcgacacccgcgcacgcagtcgctcgaggaagccgtggaggttccgagtgccaagcggtatgcggtgccaagacgacagcagccgctggacgagatgtctgccgcagcacaagagaaggaagacttcgaggctgcgtacgtcgtggattcagtgggagagatgccgacaacgttcaagtcggcaatggaatccagcgacgcagacaagtggaaagaggcgtgcgactcggaggtggagtcgctccgcaagaacgagacgtggaccctggtgccactgccgaagggacgcaaggcgatcggctgcagatgggtgttccgcgtgaaggagaaccagtctggagagatcgagcggttcaaggcgcgactggtggcgaaggggttctcgcagaagtacggcatcgactacgacgagacgttcgcgccggtggccaagttcacgtcgattcgggtgttgctgagtctggcggccaagtacaagctcacagtgcaccagatggatgtgaagaccgcgttcctcaacggcttgttggacgaggacatctacatggcgcagccggacggatatgtggacggagatcgacccgactacgtgtgccggctcaagcgttcgctgtacggcctgaagcagtcgccgcggatgtggaacaagacgatcgacgagttcatgttgaagctggggttcaagaagtgcgagtccgaccactgcatctacttgaagcgggacaatcacgacatgatgttcgtggcactgtacgtggacgatctggtcctcgccagcagcagcgacgggatgctgaaggacacgaagcaggcgctgagtgaccggttcgagatgaccgacatgggccagctcaagtactttctcggtatggagatcgagcaagatgtggcgactgggaaggtgtcggtgcggcagaccaagttcgcgaaggacattctcgagaagttcaagatggatgagagcaaccctgtgaagacaccgcaggatccgggtctgaagctgaccaaggccatgtgcgagggaggctgcaagcacgacgagaccatggcgaatgttccgtaccggaacgccgtgggctgcctcatgtatctcatggtggggactcgtccggacctcgcagcggcagtgggagtgctgagccagttcgcagcggacccatgtccgacacactggcaggcgctcaagagggtcttccgctacatccgaggcacgaagacgcacggcctcgtgtttcaagcgagcagcgaggacggactgcaaggctactcggacgcggactgggccggcgacatcgagtctcgacggagtacgagcggctacgcgttcatgatgaacggcggatgcatcagctggcgaagcaagaagcagcgcacggtggcgctctcgtcgacggaagccgagtacatggcgctgtcggaggccacgcaggaggcggtgtggctcaaggtgtttctgtgcgagctgggcgagatggcgagcgatgaagcggtgaagatctacgaggacaaccaaggctccatcgcgttggccaagaacccggagtttcacaagcgcaccaagcacatcgacattcgctaccacttcgtgcgcgagaaggtggaagacggtcaagtggtgttgcagtatgtttcgacactcgacatgctggcggacatcatgacgaagccgatcgcggcgccgcagttcgacgcgctcaggacgaagctgggcatcgtggtcgctgacgagtcgagtgggagtgttgtcaagactgatgtgacgacgccccgccaagcgaccgtgtgacgtgaacgcgtcatcagtgaggtcggcgtgaccttcactgtgtggtaccgaaatcattcaggtgattacgggacgatgattacgtcacggtgattacgccaagattgtgggtacaagatgggcatcgacgtggcgttctctgattggataaggtaactgtgtatccagtagagaatccagtagggtgtatccagtaagaggtatccagtagcaggcttagaggtagcacgcggttgcgaactaaggacctgaatcgaatcactttgcattttgccaactactgctcaagtgctcttccttttcatcgtggctcataacctgatggaaggtatggatcttggacacgaagctcggacgaagcggagggagggacgtcgcagacggcgggaccggagcgaaggcacttgaggggtagaatgaagattcgaaagtgattgaattgttggagcttacaccctactgttatagacacgcgaccctgcgtcctatcacctagtgcatctaatcaaccatcactcaccggtgttcatccaatcatcctactcgtctaatcatcggtggcgtaaacaacttaccgtaatcaccataatcaacgtgggttcggattggaccggttcgggttaaccggttaatgggtacaactggtacacagtacccaagaccagcaaccctcaataggcttccgtcgacgagagcgccaccgtgcgctgcttcttgcttcgccagctgatgcatccgccgttcatcatgaacgcgtagccgctcgtactccgtcgagactcgatgtcgccggcccagtccgcgtctgagtagccttgcagtccgtcctcgctgctcgcttgaaacacgaggccgtgcgtcttcgtgcctcggatgtagcggaagaccctcttgagcgcctgccagtgtgtcggacatgggtccgctgcgaactggctcagcactcccactgccgctgcgaggtccggacgagtccccaccatgagatacatgaggcagcccacggcgttccggtacggaacattcgccatggtctcgtcgtgcttgcagcctccctcgcacatggccttggtcagcttcagacccggatcctgcggtgtcttcacagggttgctctcatccatcttgaacttctcgagaatgtccttcgcgaacttggtctgccgcaccgacaacttcccagtcgccacatcttgctcgatctccataccgagaaagtacttgagctggcccatgtcggtcatctcgaaccggtcactcagcgcctgcttcgtgtccttcagcatcccgtcgctgctgctggcgaggaccagatcgtccacgtacagtgccacgaacatcatgtcgtgattgtcccgcttcaagtagatgcagtggtcggactcgcacttcttgaaccccagcttcaacatgaactcgtcgatcgtcttgttccacatccgcggcgactgcttcaggccgtacagcaaacgcttgtccgcggcgactgcttcaggccgtacagcaaacgcttgagccggcacacatagtcgggtcgatctccgtccacatatccgtccggctgcgccatgtagatgtcctcgtccaacacgccgttgaggaacgcggccttcacatccatctggtgcactgtgagcttgtacttggccgccagactcagcaacacccgaatcgacgtgaacttggccaccggcgcgaacgtctcgtcgtagtcgatgccgtacttctgcgagaaccccttcgccaccagtcgcgccttgaaccgctcgatctctccagactggttctccttcacgcggaacacccatctgcagccgatcgccttgcgtcccttcggcagtggcaccagggtccacgtctcgttcttgcggagcgactccacctccgagtcgcacgcctctttccacttgtctgcgtcgctggattccatcgccgacttgaacgttgtcggcatctctcccactgaatccacgacgtacgcagcctcgaagtcttccttctcttgtgctgcggcagacatctcgtccagcggctgctgtcgtctcggcaccgcataccgcttggcactcggaacctccacggcttcctcgagcgactgcgtgcgcgggtgtcgcttgctgccgggttcaaagtcttgattccgcgcagcttcttctctgttctcgtctgatccggactgagtctcttcatccgtggtgtcttcatcatcatctgtcgaaagacccaccaacacctccttcgaagcgtagtcgcgtctcccaccgtcgaagacatcctccatgaactgcgcgtcgcggctcaccaacacgcgaccgctctcgatctcctcgaaccgatacgccttctcgtgctccgagtacccgaggaaacgacagcgcaccgaccgagcgtcaaacttcgaccgcttctccttcggcacgtgcacgtacgcgtggcacccgaacaccttgaggttggccagcaaaggcttcttgccggtccaaacgtggtgcggcgacttgtcgtgactgatggcgcgcgtcggacaccggttgcggaggaacgtggccgtcatcaccgcttctccccagtactccttcgacaacccggcgtgctccagcatgcagcgcacacactccaccagcgtccgattcattcgctcggccactccgttgagctgaggcgtgtatggtggcgtgaacttctgctcgatgccgcgatccgcacacaacttggccatcgcacccgaagtgtactcgccgccgttgtcgctccgaagcaccttcactcgcttgccggtctgcgtctcagccaacgcgacgaacgcagcgaacttggcagccacctctgacttgttccgtagcaggtacaccacgcagaagtgcgacttgtcgtcgatgaacgtgacgaagtagcgcttgcctccgaacgtcgccgtctgcatcggaccgcacacatcgctgtggaccacctccagcacttgcttcgcacggttcggcgacgacttcatgaagcttactcgcgtttgcttgccgagtgcgcacccgtcgcacacctcccactgcttcaccgacgtcattgggatgccagtaccgtagcccttcttgacgatggcgtcgagaccaccatggccgatgtgaccaagtcgaaggtgccagaggtacgacgtggtgtccccttggcgattcttcgagcttgccgcattggcctcgtcagcaggcgtcctcggcgtcatgcagagcttgaacagtcctttgccttcgcgagcgccgagcttccacttgagacccttcgtttccgcgaagcacccgtcgctctcgaaggtcactggcccgacgtccttggtgaagcggccgacggagaacaggttgcgcgacagctccgggatgtgccacacacccgtgagcacacccttcttcatgccgcgcggtgtctgcatcgacatcacgatgtcgccgctccccaccgcctgaaccacgccgtcgtccgccagatgcacgtccaccggagagatcttcttgtagttcttcatgtactccttcgagtacgtcatgtgctgcgtcgcacccgagtcgaccagccacatgccgctcagcttggaggcacccgtgtcgccaccaaccgagaagaggaagtcgccagagtcatcttcgacctgcgcgacgttcgctcgttgcggcctctgccgctccccgttctcgcggatgcgcaccggacacttggcgatccaatgtccgtgctcgccgcagtagtgacaggcgctcgtcctctgcgcttgcgcctgccgtcccttgcgcttcatgtcctcgtgcaggagccgagacgtcacgagctcccacgtcagcgtgtcggaacgcgattccaacgccatgatgaggaactggtacgactcgctcagactggcaagaagcgtgatcaccaagtcgtcctcgctgaccggagcgccgaccgcgtcgagctgttccgccagcgtcttgagcttgttaatgtgctccagcacatcatcaccttcgtccatcgttgtcgtgaagaaccgtcgacgaagaaaaagcttgttcgccaggctcttcttctcgaagtgtccctcgagtcttgaccatgcatcatgcgcgtccttcgccgaccgcaccagcggcagctgcgagtcctccaacgcgagacagacgatcgccagcgccttgcgcgacttcttgcgaaacgtcgcttggtccgccgcggtcgtgcactgctcgagcttcacttccccactcgtcacttcccacagttcgcgctcctccagcaccatctgcatcttgaacttccatgtgtggaagttggttccgtcgaacttgttgatgcgggcggtcgcggtcggggcagcgtccatggcgaaggcgtagtcggggtcttggtcagggaagacggggcttgggctcataaccaaaaggaagagcacttgagcagtagttggcaaaatgcaaagtgattcgattcaggtccttagttcgcaaccgcgtgctacctctaagcctgctactggatacgtcttactggatacaccctactggattctctactggatacacagttaccttatccaatcagagaacgccacgtcgatgcccatcttgtacccacaatcttggcgtaatcaccgtgacgtaatcatcgtcccgtaatcacctgaatgatttcggtaccacacagtgaaggtcacgccgacctcactgatgacgcgttcgcgtcacacggtcgcttggcgaggcgtcgtcacatcagtcttgacaacagtgccttcgctccggtcccgccgtctgcgacgtcgagcccaaatggcatccggagccactcgaaatgacccaaggcgcacacaaacgcagagatctgacgtgctcgctgcgtcatcatgatagcccaaaacccactcgaagcgtcaagcgagcagtaccacaaatacttatccaggtcggtgagcaggtcatcgaccataggcatcgcatactccatgattgcggtgatggcatttaccatcttgtaatcgatgcacagtcggatattgccgccattcttttttagcacaatgacaatcggggacgaccacggactgctcgaaaacgcaatcagacccgccttcagcagccctcggagcaactcatagagcttcttgaggtgtcggaggggggtcctccgagccctctgtttgatcggggcgtgtccttgtacatcgatgtcacacacaaacccatatgctggtggcggcagtgcattaccactggagatcagaatattctcgtgcctccggagtaccttaaccacgcggtcctggcggccgaacccagagcaacaccgtgttgctctgtcggcgttagcgtactcagcatcgtagctacagccgcttctccaatgactgttgactgcctcccactctgggcccgacaggtggaggcagtcagcgcgtgcaacatgagttgcaggcgaagtggagctttccatgggcacctccgcgctcatgaggctcctcgttcgtacagctccgtacgaacgttcaggtagtcggtcgttggacggactacaaagtgctatcaggtgtaatggacctaccttggctcactactacggcttacacgtatgcgcacgtgtatgaagaagcatagtttcnnnnnnnnnnnnnnnnnnnnnnnnnnnnnnnnnnnnnnnnnnnnnnnnnnnnnnnnnnnnnnnnnnnnnnnnnnnnnnnnnnnnnnnnnnnnnnnnnnnnnnnnnnnnnnnnnnnnnnnnnnnnnnnnnnnnnnnnnnnnnnnnnnnnnnnnnnnnnnnnnnnnnnnnnnnnnnnnnnnnnnnnnnnnnnnnnnnnnnnnnnnnnnnnnnnnnnnnnnnnnnnnnnnnnnnnnnnnnnnnnnnnnnnnnnnnnnnnnnnnnnnnnnnnnnnnnnnnnnnnnnnnnnnnnnnnnnnnnnnnnnnnnnnnnnnnnnnnnnnnnnnnnnnnnnnnnnnnnnnnnnnnnnnnnnnnnnnnnnnnnnnnnnnnnnnnnnnnnnnnnnnnnnnnnnnnnnnnnnnnnnnnnnnnnnnnnnnnnnnnnnnnnnnnnnnnnnnnnnnnccctgtatcggcatcgcacaacaatgtgcgttatgttgcagtcattccttacgcaaataccaaggcaggcaactttgctgttgctcacaactctcagcagtttgctagtccgtttgattcggttcggttccttggagttgccaacctggttcgtcgattcgcgatttccaggttcaggtaggaaacaagatccaggatgtacactcgtatgactggcaggcgttcatggatgagtttagcaagattggtgctatcaacggcgatctgtcgcgtgagatctcgaacggtcttatcggcatcgacaagtggaagactgctcagcgctttctcgttgttgattgctcgcgcatcagtgagcctggtgtacctcagtcgattaaggtatctggtgtgaacgttgctactcagggaacgaacctcctggtgctcgttgtttacgagcgtaccctcgagattgttcgcatcaccggagaagtgttccgtgcggactgagcttggttttcgttgaattgaaatatttataataattacgatgtggcctagaattccattgcactattcgattgacacctgaactgaataatatgacaatgcgttcttgtaagtccactctcgtgattgatgaattaatatattttcaaaagaatcatgcggctatctatatagatagatagcaatgactacattaacttttggcaagcacaaatccaacaagactattgaggaggtatatgcttctgaccctggatactgccgctggctatcaaatcaaaaaggtctcgttgctcatggtagtgatattgccaaattcctagcccaaaatttggcaatgacgatggatcgttcctcatggcatggggcaaatacaagctcaggactattattgagggttgctggtcttgggtactgtgtaccagttgtacccattaaccggttaacccgaaccggtccaatccgaacccacgttgattatggtgattacggtaagttgtttacgccaccgatgattagacgagtaggatgattggatgaacaccggtgagtgatggttgattagatgcactaggtgataggacgcagggtcgcgtgtctataacagtagggtgtaagctccaacaattcaatcactttcgaatcttcattctacccctcaagtgccttcgctccggtcccgccgtctgcgacgtccctccctccgcttcgtccgagcttcgtgtccaagatccataccttccataaggttatgagcccaagcaccatgtcctctgcccaagacgcctcgaccaaggtctccattgacaagttcaacggggacaactacgcgacgtggaaccgctacatgcgtggcgtgttcgtgaccaagtcgacgtggcatgtcgtgaaccgcgagacgacgccgagcttcacggactcgcgggccaaggacgactacgtcaagtcgagcaacatcgcgttcggactgatgttgctccacatggacgcggactaccaccatgtggtcgacgactgcgaggaagcgtgggttgcgtggacgcgcctgaagacgctgtacggtggttcgcagaaggctggacgcatctacctgaagcgccaactcttcagcatggagatgtcggaaggcggcaacgtcttgcatcattgcaacgaggtcctcaacatcagcgccaagctcagcagcatcggcgccaagatggaggatgaggacgtggcgatctgcctgttgcgcagcctccccaagagctacgagaacgtcgtgctgaacttggagatgagcagcgctgaactacgatcgcaagacgtcgtgaaggtgctgacgaatgagcacatcaagagacaaggcgaggagacggcgacggtgaagacggagaatgcggccaaggcgttcaacaccgaccgagagtctcgccagtgtacgtactgcgggaaattggggcacacgattgacaagtgctggaccaagcagaaggacgagaatcggggcccaagacgcggcggcaatggcaatggccgtggacgcggggccaacaatgcccagtggaggaacgacgacgccagctacaactacgactacggctatgatcgagtggcgttcgcggtctcactggagtgtggcatttcgacgggcaagaatgtgtccgggttgtgggcggtcgacagcggcgcaacgcaccacatctgcaacgacaacgccaagttcgctcatttgattgagcggaatgaaggcgaactttcggtggccgacggcaacaaggcggccatcatgggtgtggggaccatcgtggaacgagtggttctgcccaacggcgacgagcgcgacatcgagatcaagaacgcgctgtacgtcccaagcatgagcaagaatctgctttcggtgccacagatcaacaagagtggtctgttccaagtcgtgttcgacagcaccaagatgcagattgcgcacaagggctccaagcaagtggtggcgacggcaaacctcgtggatggactctactggctccagacgcctcagcgatcggcgaatgcggcgaccagtgggaagacggtcgacttacacgcgcgtatgggtcacgctccggtggaggtgcttcgcaagatggtcgacaacaacatgatcaaggacgcgaaggcaccttccaagtcgagtggaccaagcgtgtgtcgcggctgccagcaagggaaaatggtccagaagccgttcccaagcaaccgtgacaagcgtcactacgacacgttcgagctgctccacttcgacgtgtgcggccccatggaagaagagtcactgggtggcagcaagtatctgctgctgatcgtggacgaagccagcggatgcatgaaggggttctgcctgcgtgccaagtcggagagcgaggactgcatcaagatgtacgtcacgaaggtgcagacgcagttcggcaagaaggtcaagtttgtgcggcacgacggagcccgtgagttcgcgaccaactcgctcaaggccttctacgaagtcgaaggcatcgagcagcaaaccacggttccgtacgcgcaccagaccaacggcacggcagaacgcgccatccggaccatcgtcacgattggccgcagcatgctgcatcacgccaagctggacaagagcttctgggctgaggcggccatgacagccatctacgtgaagaatcgtctgccatcacccaagatcgaacacaagactccgttcgagatcgtttacaagtccaagccgagtgtgaagcacatgcgtgtgttcggatgccagacgtacatcctgacgccgaaggaaagacggcgcaagtgggaccccaaggctcgcgccgggctgttcctcggctacgaagaagtgtccaaggcgtatcgagtttatgacatcgaggcggggcaggtggttatcagtcgcgatgtcaacttcgatgagtcgacctttggactttcgacgcatacttcggatgaagacgtcgatgatgctgtgctggacttggacgcgctggacctggacgacaacgatggaccgcgccaaacgagcttcaagcaggcggggaagcgcaagtaccgaccgagtggcgacgacaacactgccagaagatcgcgccccgttcgccaccgagctggcttagaagaagcaagtgcgccggacgtatcctcctcgcgccgagccgaccccgacgaagaagaaaagtctggggaccaagatgaagacgacgactcgacgcctccagtgttttggcgtgccagtggaagcagcagccgatctatcggagccgacgacgttccaagaggctgtgaacggttctgatcaaatgcactggcgtaaagcgatccgcgcggagctcaagtcgatgcgactgcgtggtgtgtttcgagctgccaagttgcctaacggacaacgcgccatcgataccaagtgggtgttcaagatcaagcgcaaagcggacggctcgatcgagaagtacaaggcgcgcctcgtggccaagggcttcaagcagaagtacggcattgactacaccgagacgttctcgcccgtggtcaagtatgtgacgctgcgcatggtgatcgcgattgctaagtattttggctggcccctcgaccaactcgacgtggtgacagcattcctgtacgggataatgaaggaggtggtcttctgcgtggttccggaaggcgtcgaactggatggtgacttcgactgcctggaactggtgaaggccatctacggtctcaagcaagcttcgcgagggtggaacgagaccttcgacgagttcgtgtgctccatcggcttccaagtgtcggccttcgatccgtgcctctacatcaaggtggtggacggtcactgcgtgcttgtactggtgtacgtggatgacgtactgattaccgggagttcgcccgagctgatcgcacgcacgaagaccgacctgaagacgcgcttcgagatgaccgacagcggcaagtgcgcgtttgttcttgggatcgagttggtggacggcccggacggcagcgtgaccatgtgtcagcggcgatacgtggacgacatcctgaagcgcttcgccatggacgagtgcaaggccgtggtgagtccggtggacataagcactcgactggttccaagagacgcggcgaccaaggtgaacgctccgtttcgcgaagctgttggtgctctgatgcacctgatgaccgccacgcgcccagacatcgcgtacgccgttggctatgtatcgcgcttcatggagaacccccaagaggaacactgggttgcggtcaagcgtatctttcgctacctgcaaggcaccaagacgcatgggatctgcttcaagccgggcgacaagatcgactttcgtggctactcggacgcggactgggccggcgacctcgccgaccgcaagtccacttcaggctacacgttcatgctcatgagtgcgcctgtgagctggggaagcaagaagcaatgaagcggagtacatcgcgctcagtctggctatccaagaaggcaagtggattcatcgcctgctatgcgagattctggcggccgctaatgagactggacccgaactcatgatccgcgaagacaaccagtcgtgcatcaagatgacgaagaacccagtgaaccacggtcgcgccaagcacatcgacatcaagtaccaccacatccgcgatgaagtcaagcgcggcgaagtcaagctccagtactgcgagacttctgtgatgctagcggacatcatgacgaaggcgcttgcgggaccacgccacacggatctgacggtggctctcggcattcgtgggacttcgcattgagggggcgtattgagggttgctggtcttgggtactgtgtaccagttgtacccattaaccggttaacccgaaccggtccaatccgaacccacgttgattatggtgattacggtaagttgtttacgccaccgatgattagacgagtaggatgattggatgaacaccggtgagtgatagttgattagatgctattgagggttgctggtcttgggtactgtgtaccagttgtacccattaaccggttaacccgaaccggtccaatccgaacccacgttgattatggtgattacggtaannnnnnnnnnnnnnnnnnnnnnnnnnnnnnnnnnnnnnnnnnnnnnnnnnnnnnnnnnnnnnnnnnnnnnnnnnnnnnnnnnnnnnnnnnnnnnnnnnnnnnnnnnnnnnnnnnnnnnnnnnnnnnnnnnnnnnnnnnnnnnnnnnnnnnnnnnnnnnnnnnnnnnnnnnnnnnnnnnnnnnnnnnnnnnnnnnnnnnnnnnnnnnnnnnnnnnnnnnnnnnnnnnnnnnnnnnnnnnnnnnnnnnnnnnnnnnnnnnnnnnnnnnnnnnnnnnnnnnnnnnnnnnnnnnnnnnnnnnnnnnnnnnnnnnnnnnnnnnnnnnnnnnnnnnnnnnnnnnnnnnnnnnnnnnnnnnnnnnnnnnnnnnnnnnnnnnnnnnnnnnnnnnnnnnnnnnnnnnnnnnnnnnnnnnnnnnnnnnnnnnnnnnnnnnnnnnnnnnnnnnnnnnnnnnnnnnnnnnnnnnnnnnnnnnnnnnnnnnnnnnnnnnnnnnnnnnnnnnnnnnnnnnnnnnnnnnnnnnnnnnnnnnnnnnnnnnnnnnnnnnnnnnnnnnnnnnnnnnnnnnnnnnnnnnnnnnnnnnnnnnnnnnnnnnnnnnnnnnnnnnnnnnnnnnnnnnnnnnnnnnnnnnnnnnnnnnnnnnnnnnnnnnnnnnnnnnnnnnnnnnnnnnnnnnnnnnnnnnnnnnnnnnnnnnnnnnnnnnnnnnnnnnnnnnnnnnnnnnnnnnnnnnnnnnnnnnnnnnnnnnnnnnnnnnnnnnnnnnnnnnnnnnnnnnnnnnnnnnnnnnnnnnnnnnnnnnnnnnnnnnnnnnnnnnnnnnnnnnnnnnnnnnnnnnnnnnnnnnnnnnnnnnnnnnnnnnnnnnnnnnnnnnnnnnnnnnnnnnnnnnnnnnnnnnnnnnnnnnnnnnnnnnnnnnnnnnnnnnnnnnnnnnnnnnnnnnnnnnnnnnnnnnnnnnnnnnnnnnnnnnnnnnnnnnnnnnnnnnnnnnnnnnnnnnnnnnnnnnnnnnnnnnnnnnnnnnnnnnnnnnnnnnnnnnnnnnnnnnnnnnnnnnnnnnnnnnnnnnnnnnnnnnnnnnnnnnnnnnnnnnnnnnnnnnnnnnnnnnnnnnnnnnnnnnnnnnnnnnnnnnnnnnnnnnnnnnnnnnnnnnnnnnnnnnnnnnnnnnnnnnnnnnnnnnnnnnnnnnnnnnnnnnnnnnnnnnnnnnnnnnnnnnnnnnnnnnnnnnnnnnnnnnnnnnnnnnnnnnnnnnnnnnnnnnnnnnnnnnnnnnnnnnnnnnnnnnnnnnnnnnnnnnnnnnnnnnnnnnnnnnnnnnnnnnnnnnnnnnnnnnnnnnnnnnnnnnnnnnnnnnnnnnnnnnnnnnnnnnnnnnnnnnnnnnnnnnnnnnnnnnnnnnnnnnnnnnnnnnnnnnnnnnnnnnnnnnnnnnnnnnnnnnnnnnnnnnnnnnnnnnnnnnnnnnnnnnnnnnnnnnnnnnnnnnnnnnnnnnnnnnnnnnnnnnnnnnnnnnnnnnnnnnnnnnnnnnnnnnnnnnnnnnnnnnnnnnnnnnnnnnnnnnnnnnnnnnnnnnnnnnnnnnnnnnnnnnnnnnnnnnnnnnnnnnnnnnnnnnnnnnnnnnnnnnnnnnnnnnnnnnnnnnnnnnnnnnnnnnnnnnnnnnnnnnnnnnnnnnnnnnnnnnnnnnnnnnnnnnnnnnnnnnnnnnnnnnnnnnnnnnnnnnnnnnnnnnnnnnnnnnnnnnnnnnnnnnnnnnnnnnnnnnnnnnnnnnnnnnnnnnnnnnnnnnnnnnnnnnnnnnnnnnnnnnnnnnnnnnnnnnnnnnnnnnnnnnnnnnnnnnnnnnnnnnnnnnnnnnnnnnnnnnnnnnnnnnnnnnnnnnnnnnnnnnnnnnnnnnnnnnnnnnnnnnnnnnnnnnnnnnnnnnnnnnnnnnnnnnnnnnnnnnnnnnnnnnnnnnnnnnnnnnnnnnnnnnnnnnnnnnnnnnnnnnnnnnnnnnnnnnnnnnnnnnnnnnnnnnnnnnnnnnnnnnnnnnnnnnnnnnnnnnnnnnnnnnnnnnnnnnnnnnnnnnnnnnnnnnnnnnnnnnnnnnnnnnnnnnnnnnnnnnnnnnnnnnnnnnnnnnnnnnnnnnnnnnnnnnnnnnnnnnnnnnnnnnnnnnnnnnnnnnnnnnnnnnnnnnnnnnnnnnnnnnnnnnnnnnnnnnnnnnnnnnnnnnnnnnnnnnnnnnnnnnnnnnnnnnnnnnnnnnnnnnnnnnnnnnnnnnnnnnnnnnnnnnnnnnnnnnnnnnnnnnnnnnnnnnnnnnnnnnnnnnnnnnnnnnnnnnnnnnnnnnnnnnnnnnnnnnnnnnnnnnnnnnnnnnnnnnnnnnnnnnnnnnnnnnnnnnnnnnnnnnnnnnnnnnnnnnnnnnnnnnnnnnnnnnnnnnnnnnnnnnnnnnnnnnnnnnnnnnnnnnnnnnnnnnnnnnnnnnnnnnnnnnnnnnnnnnnnnnnnnnnnnnnnnnnnnnnnnnnnnnnnnnnnnnnnnnnnnnnnnnnnnnnnnnnnnnnnnnnnnnnnnnnnnnnnnnnnnnnnnnnnnnnnnnnnnnnnnnnnnnnnnnnnnnnnnnnnnnnnnnnnnnnnnnnnnnnnnnnnnnnnnnnnnnnnnnnnnnnnnnnnnnnnnnnnnnnnnnnnnnnnnnnnnnnnnnnnnnnnnnnnnnnnnnnnnnnnnnnnnnnnnnnnnnnnnnnnnnnnnnnnnnnnnnnnnnnnnnnnnnnnnnnnnnnnnnnnnnnnnnnnnnnnnnnnnnnnnnnnnnnnnnnnnnnnnnnnnnnnnnnnnnnnnnnnnnnnnnnnnnnnnnnnnnnnnnnnnnnnnnnnnnnnnnnnnnnnnnnnnnnnnnnnnnnnnnnnnnnnnnnnnnnnnnnnnnnnnnnnnnnnnnnnnnnnnnnnnnnnnnnnnnnnnnnnnnnnnnnnnnnnnnnnnnnnnnnnnnnnnnnnnnnnnnnnnnnnnnnnnnnnnnnnnnnnnnnnnnnnnnnnnnnnnnnnnnnnnnnnnnnnnnnnnnnnnnnnnnnnnnnnnnnnnnnnnnnnnnnnnnnnnnnnnnnnnnnnnnnnnnnnnnnnnnnnnnnnnnnnnnnnnnnnnnnnnnnnnnnnnnnnnnnnnnnnnnnnnnnnnnnnnnnnnnnnnnnnnnnnnagggggggcaggtggttatcagtcgcgatgtcaacttcgatgagtcgacctttggactttcgacgcatacttcggatgaagacgtcgatgatgctgtgctggacttggacgcgctggacctggacgacaacgatggaccgcgccaagcgagcttcaagcaggcggggaagcgcaagtaccgaccgagtggcgacgacaacactgccagaagatcgcgccccgttcgccaccgagctggcttagaagaagcaagtgcgccggacgtatcctcctcgcgccgagccgaccccgacgaagaagaaaagtctggggaccaagatgaagacgacgactcgacgcctccagtgttttggcgtgccagtgccaacgctgtggaagcagcagccgatctatcggagccgacgacgttccaagaggctgtgaacggtcctgatcaagtgcactggcgcaaagcgatccgcgcggagctcaagtcgatgcgactgcgtggtgtgtttcgagctgccaagttgcctaacggacaacgcgccatcgataccaagtgggtgttcaagatcaagcgcaaagcggacggctcgatcgagaagtacaaggcgcgcctcgtggccaagggcttcaagcagaagtacggcattgactacaccgagacgttctcgcccgtggtcaagtatgtgacgctgcgcatggtgatcgcaattgctaagtattttggctggcccctcgaccaactcgacgtggtgacagcattcctgtacgggataatgaaggaggtggtcttctgcgtggttccggaaggcgtcgaactggatggtgacttcgactgcctggaactggtgaaggccatctacggtctcaagcaagcttcgcgagtgtggaacgagaccttcgacgagttcgtgtgctccatcggcttccaagtgtcggccttcgatccgtgcctctacatcaaggtggtggacggtcactgcgtgcttgtactggtgtacgtggatgacgtactgactaccgggagttcgcccgagctgatcgcacgcacgaagaccgacctgaagacgcgcttcgagatgaccgacagc
